(19) United States
(12) Patent Application Publication
(10) Pub. No.: US 2007/0105181 A1
(43) Pub. Date: May 10, 2007

(54) Identification of cancer biomarkers and phosphorylated pdroteins

(75) Inventors: Robert M. Pope, San Marcos, CA (US); Xiquan Liang, Escondido, CA (US); Mahbod Hajivandi, Vista, CA (US); John Leite, Vista, CA (US)

Correspondence Address: STERNE, KESSLER, GOLDSTEIN & FOX P.L.L.C., 1100 NEW YORK AVENUE, N.W., WASHINGTON, DC, 20005, US

(73) Assignee: Invitrogen Corporation, Carlsbad, CA (US)

(21) Appl. No.: 11/417,264

(22) Filed: May 4, 2006

Related U.S. Application Data
(60) Provisional application No. 60/678,119, filed on May 4, 2005.
(60) Provisional application No. 60/678,392, filed on May 6, 2005.
(60) Provisional application No. 60/687,355, filed on Jun. 3, 2005.

(51) Int. Cl. C12Q 1/37

(52) U.S. Cl. 435/23; 436/86

(57) ABSTRACT

Methods are provided for identifying proteins that are differentially expressed in disease state and normal cells. Stable isotope labeling of cells in culture allows for the identification of a multiplicity of proteins whose differential abundance in normal and disease state cells can be indicative of the disease state. Biomarkers are identified for breast cancer, in which the biomarkers are proteins having a two-fold or greater difference in abundance between breast cancer and normal cells. Identified biomarkers can be used detection methods that can provide diagnosis, typing, staging, or prognosis of cancer, such as breast cancer, or can be used to predict the response of cancer, such as breast cancer, to one or more anti-cancer agents.

### CROSS-REFERENCE TO RELATED APPLICATIONS

[0001] This application claims benefit of priority to U.S. provisional application 60/678,119, filed May 4, 2005, entitled “Cancer Biomarkers” and naming Xiquan Liang, Mahbod Hajivandi, Robert M. Pope, and John Leite as inventors; to U.S. provisional application 60/678,392, filed May 6, 2005, entitled “Identification of Cancer Biomarkers and Phosphorylated Proteins” and naming Robert M. Pope, Xiquan Liang, Mahbod Hajivandi, and John Leite as inventors; and to U.S. provisional application 60/687,355, filed Jun. 3, 2005, entitled “Identification of Cancer Biomarkers and Phosphorylated Proteins” and naming Robert M. Pope, Xiquan Liang, Mahbod Hajivandi, and John Leite as inventors. Each of these applications is incorporated by reference herein in its entirety.

### SEQUENCE LISTING

[0002] The instant application contains a “lengthy” Sequence Listing which has been submitted via CD-R in lieu of a printed paper copy, and is hereby incorporated by reference in its entirety. Said CD-R, recorded on May 3, 2006, are labeled CRF, “Copy 1” and “Copy 2”, respectively, and each contains only one identical 1,006 Kb file (IVGN0248.APP).

### BACKGROUND OF THE INVENTION

[0003] 1. Field of the Invention

[0004] The invention relates generally to the identification and detection of molecules that are differentially expressed in different cell types and more specifically to the discovery and use of biomarkers that are indicative of disease states.

[0005] 2. Background Information

[0006] Quantitative proteomics, techniques used to measure differential expression and processing profiles of the entire complement of gene products, may be used to identify and characterize onset disease biomarkers by comparing cell culture samples from both normal and disease states. Stable isotope labeling with amino acids in cell culture (SILAC) is an emerging technology for quantitative proteomics, allowing quantification of the cellular differences between two different states. SILAC methods and applications are described in U.S. Pat. No. 6,391,649 and U.S. Pat. No. 6,642,059, both of which are herein incorporated by reference in their entireties, and in particular for all disclosure of methods of labeling proteins of cells in culture with isotopes and comparing protein levels of the cell cultures using mass spectrometry (MS).

[0007] SILAC uses the natural metabolic machinery of the cell to label proteins with either ‘light’ or ‘heavy’ amino acids made with light (standard) or heavy isotopes. Peptides with either light or heavy amino acids are chemically identical and therefore co-migrate in any separation method (such as SDS-PAGE, IEF or other liquid chromatography, etc.), eliminating quantification error due to unequal sampling. However, the peptides are isotopically distinct so that the mass difference between light and heavy peptides is distinguishable by mass spectrometry (MS). Based on the relative intensity of an isotopic peptide pair in MS, differential protein expression and the status of posttranslational modification between two different samples can be quantified. The correlation of a particular peptide to the precursor protein from which it originates is based upon the fragmentation pattern of the (usually mass-selected) peptide, hence its MS/MS profile.

[0008] SILAC offers additional advantages over other technologies such as ease of use, compatibility with any lysis buffer or separation technology, and 100% labeling efficiency. Because the incorporation of stable isotopic forms of amino acids occurs as the proteins are assembled or degraded in cell culture, these chemically identical proteins are copies of their light congeners bearing what are, in effect, “label-less labels” at every site of the substituted amino acid. Moreover, since one is free to select any amino acid as a label, one may select an amino acid specific to any protease used in a digestion protocol later and, thus achieve a single label on each and every digest fragment. This makes it possible to track the status of posttranslational modifications, because in principle, proteome coverage is complete.

[0009] The present invention expands the use of SILAC to the detection of biomarkers that can be useful in the detection and classification of disease state cells, such as cancer cells. The present invention provides methods of identifying biomarkers using SILAC, methods of detecting and classifying cells using biomarkers identified by SILAC, and biomarkers useful in the detection and classification of cancer, particularly breast cancer.

### SUMMARY OF THE INVENTION

[0010] The present invention provides methods of identifying a multiplicity of proteins whose levels differ among cells of a disease state and normal cells using stable isotope labeling of cells in culture, and using one or more of the identified proteins as biomarkers for a disease state. The present invention provides reliable methods of identifying markers that are differentially expressed in one or more cell compartments, such as, for example, cell membranes.

[0011] In one aspect, the present invention includes a method of identifying at least one biomarker for cells of a disease state, where the method includes: providing a first cell culture of disease state cells; providing a second cell culture of control cells, in which the cell culture media of the first cell culture contains at least one isotope at a non-natural level in a form that is metabolically incorporated into proteins within cultured cells, in which the isotope is present at a natural level is the second cell culture; allowing the cells in each of the cell cultures to divide; combining at least a portion of the cells of the first cell culture with at least a portion of the cells of the second cell culture to form a mixed cell sample; separating one or more proteins from the mixed cell sample; performing mass spectrometry on the one or more proteins, or peptides generated from the proteins, to obtain a mass spectrometry profile; using the mass spectrometry profile to compare the abundance of at least one of the one or more proteins containing the isotope at a natural level with the abundance of the one or more corresponding proteins that contain the isotope at a non-natural level, in which a difference in abundance of a protein having the isotope at a non-natural level and the same protein having the isotope at a natural level is indicative of a biomarker for disease state cells.

[0012] In some preferred embodiments, disease state and normal cells are fractionated prior to the separation of proteins for mass spectrometry. For example, cells can be fractionated for the isolation of cell membranes, mitochondria, nuclei, or cytosolic fractions. Proteins from cell fractions can be further separated, such as by electrophoresis or chromatography, preferably digested with a protease, and analyzed using mass spectrometry to identify proteins that have different abundances in disease state and normal-cells.

[0013] The present invention also provides biomarkers for cancer. Such biomarkers can be used to detect or diagnose cancer in a subject, such as a patient known to have or suspected of having cancer. One or more than one of the identified biomarkers can be used to detect, diagnose, type, stage, provide a prognosis for, or predict a drug response of cancer in a patient. One or more than one of the identified biomarkers can be used to detect, diagnose, type, stage, provide a prognosis for, or predict a drug response of breast cancer in a patient.

[0014] Data provided herein identifies the proteins of Table 1 as being proteins that are differentially expressed in human breast cancer cells. Accordingly, provided herein is a method of detecting one or more biomolecules, comprising detecting in a biological sample, expression of a protein of Table 1, or a nucleic acid encoding a protein of Table 1, wherein said biological sample is a sample of a patient with a breast pathology. The biological sample can be, for example, a tumor biopsy sample or a breast tumor biopsy sample. Furthermore, the sample can be a fluid sample. For example, sample of blood, plasma, serum, urine, saliva, lymphatic fluid, pelvic lavage, lung aspirate, nipple aspirate, or breast duct lavage.

[0015] In certain aspects of the invention, expression is detected of two or more, three or more, four or more, five or more, six or more, seven of more, eight or more, nine or more, ten or more, twenty-five or more, one-half, one-third, or all of the proteins of Table 1, or of nucleic acids encoding two or more, three or more, four or more, five or more, six or more, seven of more, eight or more, nine or more, ten or more, twenty-five or more, one-half, one-third, or all of the proteins of Table 1.

[0016] Certain aspects of the invention provide quantitative methods. For example, in certain aspects an expression level is determined of a protein of Table 1, or a nucleic acid encoding a protein of Table 1. In certain embodiments, an altered expression level in the biological sample compared to a normal sample is indicative of the presence of a breast pathology, such as breast cancer. Furthermore, expression levels can be correlated with a type of cancer, a stage of cancer, a prognosis, and/or response to one or more anti-cancer agents.

[0017] Typically, methods of this embodiment of the invention are performed by contacting the biological sample with a specific binding reagent that binds to the protein or the nucleic acid. Expression levels can then be quantitated by measuring the amount of specific binding reagent that binds to biomolecules in the sample.

[0018] In another embodiment, provided herein is a kit that includes a specific binding reagent that binds to a protein of Table 1, or that binds to a nucleic acid encoding a protein of Table 1. Furthermore, the kits typically include a control that is a biological sample derived from a subject having a breast pathology. For example, the control can include cells obtained directly from a subject having a breast pathology, or tissue culture cells derived from cells of a subject having a breast pathology, such as breast cancer or a breast tumor. The specific binding reagent of the kit is typically an antibody or a nucleic acid. The specific binding reagent is typically present in one or more tubes that are associated together in packaging and shipped from a manufacturer to a customer.

[0019] The kit can include additional specific binding reagents. For example, specific binding reagents that bind to one or more, two or more, three or more, four or more, five or more, six or more, seven of more, eight or more, nine or more, ten or more, twenty-five or more, ½, ⅓ or all of the proteins, or encoding nucleic acids of Table 1.

[0020] In one embodiment, the kit includes specific binding reagents that bind to one or more, two or more, three or more, four or more, five or more, six or more, seven of more, eight or more, nine or more, ten or more, twenty-five or more, one-half, one-third, or all of the proteins, or encoding nucleic acids of Table 2.

[0021] In another aspect the present invention provides methods for identifying one or more phosphoproteins in cells using stable isotope labeling of cells in culture, and identifying one or more phosphoproteins whose abundance differs between or among cells of different types or states, or between or among cells subjected to different treatments, such as different stimuli or inhibitors. One embodiment provides methods of identifying phosphoproteins whose phosphorylation state differs between cells treated with a kinase inhibitor and non-treated cells, where the abundance of a phosphopeptide derived from a phosphoprotein relative to a nonphosphorylated form of the phosphopeptide is indicative of a difference in the phosphorylation state of the phosphoprotein between the compared cells. A related embodiment provides methods of identifying phosphoproteins whose phosphorylation state differs among cells treated with a kinase inhibitor for a different time period or at a different concentration, where the abundance of a phosphopeptide derived from a phosphoprotein relative to a nonphosphorylated form of the phosphopeptide is indicative of a difference in the phosphorylation state of the phosphoprotein between or among the compared cultures.

[0022] The present invention also includes a method of isolating phosphoproteins and phosphopeptides from samples, where the method includes: providing a sample that contains one or more phosphoproteins or phosphopeptides; applying the sample to a column that comprises a matrix having a resin derivatized with iminodiacetic acid that has been charged with Fe⁺³; and eluting one or more phosphoproteins or phosphopeptides from the column to obtain one or more isolated phosphoproteins or phosphopeptides. In preferred embodiments, the sample is derived from a cellular fraction and the one or more proteins of the cellular fraction have been digested with at least one protease prior to applying the sample to the column. In this preferred embodiment, the column is used to isolate phosphopeptides.

[0023] In yet another aspect, the invention provides a peptide derived from the Dok-2 protein that has a tyrosine residue that is phosphorylated in CML cells, where the peptide comprises the sequence GQEGEYAVPFDAVAR (SEQ ID NO: 186). The peptide spans amino acids 294 through 318 of the human Dok-2 protein (SEQ ID NO:187; Genbank accession no. gi 41406050). The invention includes uses of the Dok-2 peptide in kinase and phosphatase assays. The invention also includes peptides having sequences homologous to the human Dok-2 294-318 sequence that can be phosphorylated by the Bcr-Abl kinase, other kinases that are inhibited by ST1571, such as but in no way limited to sequences of Dok-2 proteins or homologs of other species, or other kinases that are directly or indirectly regulated by the Bcr-Abl kinase or kinases inhibited by ST1571. The invention also includes peptide and proteins comprising the human Dok-2 294-318 sequence, or sequences homologous to the human Dok-2 294-318 sequence, that can be phosphorylated by the Bcr-Abl kinase, other kinases that are inhibited by ST1571, or other kinases that are directly or indirectly regulated by the Bcr-Abl kinase or kinases inhibited by ST1571.

### BRIEF DESCRIPTION OF THE DRAWINGS

[0024] FIG. 1 is a schematic depiction of one embodiment of the present invention for relative quantification of membrane proteins between normal and malignant breast cell lines originating from the same patient with breast carcinoma.

[0025] FIG. 2 depicts the precision of quantification of peptides by SILAC/MS. The tryptic peptide extract with light and heavy labels was analyzed by RPLC with Q-TOF detection. Multiple isotopic peptide pairs derived from vimentin were recovered in a single LC-MS/MS run and were used to calculate the precision of quantification.

[0026] FIG. 3 depicts MS spectra that demonstrate the reproducibility of SILAC experiments. SILAC experiments were performed three times separately. The top panel shows the spectra for a vimentin peptide and the bottom panel shows the spectra for an oxygen regulated protein peptide detected in the three experiments.

[0027] FIG. 4 depicts MS spectra that demonstrate that the relative ratio of isotopic peptide pairs is consistent regardless of the charge state of peptides as well as the number of Lys and/or Arg contained in the peptides.

[0028] FIG. 5 is a Western blot of normal (N) and cancerous (C) breast cells grown in culture with antibodies against osteoblast-specific factor 2 (upper panel), DNA-activated protein kinase (middle panel), and alpha 2 macroglobulin (lower panel). (S) designates culture medium of breast cancer cells, in which osteoblast-specific factor 2 was detected.

[0029] FIG. 6 depicts mass spectra of phosphopeptides from tryptic digests of beta-casein isolated with A) a commercially available phosphopeptide isolation kit from Pierce, or B) Toyopearl resins.

[0030] FIG. 7 (A) depicts the mass spectrum of a phosphopeptide of m/z 1688.7 from Dok-2 tryptic digest using IMAC. (B) provides the MS/MS spectrum of doubly charged 845.44 m/z precursor from Dok-2 analyzed on the Waters Q/TOF API US

[0031] FIG. 8 shows MALDI-TOF mass spectra of Dok-2 peptide isolated from heavy tyrosine-labeled cells with and without one hour (A) or two hours (B) of kinase inhibitor treatment.

[0032] FIG. 9 shows MALDI-TOF mass spectra of cells labeled with heavy tyrosine and in the presence and absence of a kinase inhibitor that allows identification of phosphoryated peptides.

### DETAILED DESCRIPTION OF THE INVENTION

[0033] The present invention is based in part on the discovery that biomarkers can be identified by using SILAC to analyze changes in membrane and phosphorylated protein expression in disease state cells, including primary cultured cells. Furthermore, the present invention is based in part on the identification of a set of new breast cancer biomarkers, using the methods provided herein. Additionally, the present invention is based in part on the discovery that an iminodiacetic acid resin is a particularly effective column for phosphoprotein and phosphopeptide isolation, especially in the presence of iron.

I. SILAC for Identification of Biomarkers

[0034] The present invention provides a method of identifying at least one biomarker for cells of a disease state by comparing the levels of one or more proteins in two or more cell cultures using stable isotope labeled amino acids in cell culture. The method comprises: (1) providing a first cell culture comprising disease state cells; (2) providing a second cell culture comprising normal cells, in which the cell culture media of the first cell culture comprises at least one isotope at a non-natural abundance, and the second cell culture does not comprise the at least one isotope at a non-natural abundance, where the isotope at a non-natural abundance is in a from that is metabolically incorporated into proteins within cultured cells; and (3) allowing the cells in each of the cell cultures to divide. After the cells have divided in culture so that isotopes in the culture media have been incorporated into proteins, the method further comprises: (4) combining at least a portion of the cells, cellular constituents, or media of the first cell culture with at least a portion of the cells, cellular constituents, or media of the second cell culture to form a mixed cell sample; (5) separating one or more proteins from the mixed cell sample; (6) performing mass spectrometry on the one or more proteins, or peptides derived from one or more proteins, to obtain a mass spectrometry profile; and (7) using the mass spectrometry profile to compare the level of at least one of the one or more proteins comprising the isotope at a non-natural abundance with the level of the at least one of the one or more proteins that does not comprise the isotope at a non-natural abundance, in which a difference in the level of the non-naturally occurring isotope form of a protein from the naturally occurring isotope form is indicative of a biomarker for cells of a disease state.

[0035] Preferably, the second culture comprises an isotope at a much lower abundance than is present in the first culture, for example, the first culture can comprise an isotope at a level that is much greater than its natural abundance, and the second culture can comprise the isotope at a level that is equivalent to the isotopes natural abundance, or can 10% or less of its level in the first cell culture, 5% or less of its level in the first cell culture, 2% or less of its level in the first cell culture, or 1% or less of its level in the first cell culture. In some embodiments of the invention, the first cell culture can comprise an isotope at a level that is greater than its natural abundance, and the second cell culture can comprise the isotope at a level that is not detectable such as by mass spectrometry to detect incorporation of isotopes into protein.

[0036] The methods of the present invention compare protein levels of two or more cell cultures. In preferred embodiments, the methods are performed using two cell cultures that preferably comprise cells of the same type, where one culture comprises normal cells and the other culture comprises cells of a disease state. In some preferred applications of the method, the cells can be normal and cancer cells of the same type (for example, normal breast cells and breast cancer cells). Cells can also be of the same type, in which one culture of the cells receives a treatment that induces a disease or pathologic state before or during the culturing of cells with isotope label. For example, one cell culture can be infected with a virus while a corresponding culture of the same type is uninfected. In another example, one cell culture can be treated with one or more agents that causes oxidative damage to cells, while a corresponding culture of the same cell type is untreated.

[0037] The methods of the present invention can also be used to identify biomarkers for cell differentiation. In these methods, two or more cultures of stem cells can be compared by growing the cultures in different abundances of heavy isotopes and allowing the heavy isotopes to be incorporated into biomolecules such as proteins. The different cultures can be subjected to different conditions. For example, one culture may be treated with one or more growth factors while another culture is grown in the absence of a growth factor. Cells or cellular components of the cultures can be combined and the proteins or other biomolecules can be analyzed by MS to determine the relative abundances of biomolecules in the cultures. Proteins that differ in abundance in stem cells in response to a growth factor or other stimulus can be used to identify proteins that function in the differentiation pathway.

[0038] The method can also be performed for identification of nonprotein modification of proteins (such as, but not limited to, phosphorylation, glycosylation, prenylation, or acylation), or for identification of nonprotein biomarkers, for example, for the identification of carbohydrates, lipids, steroids, or nucleic acids that may differ in abundance between cells of a disease state and normal cells. In these cases, precursor molecules that are to be labeled with one or more heavy isotopes and added to a cell culture are preferably direct or indirect precursors of the groups or molecules whose abundance is to be compared, and can include, for example, glucose, sucrose, one or more nucleotides, phosphate, inositol, choline, isoprenylated acids, econosoic acids, glycerol, cholesterol, etc.

[0039] FIG. 1 outlines a protocol for applying the methods of the present invention to identifying biomarkers in cancer cells. In this depiction, normal and cancer cells are grown in media containing either “light” lysine (Lys) and arginine (Arg), that have naturally occurring isotopes of, for example nitrogen and carbon, or “heavy” Lys and Arg, that have a higher abundance of an isotope of nitrogen or carbon, for example, than the natural abundance. The two cultures are incubated for at least six doubling times and then combined at 1:1 ratio. The cell mixture is lysed in hypotonic buffer and crude membranes are obtained by centrifugation. Membrane pellets are dissolved in SDS sample buffer and analyzed by SDS-PAGE. The entire gel lane is divided into approximately 40 sections, followed by in-gel tryptic digestions. Peptide extracts are analyzed by mass spectrometry (here, nanoelectrospray LC-MS/MS). Relative quantification is achieved via the ratios of unique isotopic peptide pairs in the MS spectrum.

[0040] FIG. 2 shows quantitation of peptides by SILAC/MS. In this experiment tryptic peptide extract with light and heavy labels was analyzed by RPLC with Q-TOF detection. Multiple isotopic peptide pairs derived from human vimentin (Genbank gi 418249; SEQ ID NO:43) were recovered in a single LC-MS/MS run and were used to calculate the precision of quantification. The relative ratio of isotopic peptides is remarkably consistent with a standard deviation of ±10%. The relative ratio of isotopic peptide pairs is identical regardless of the charge state of peptides as well as the number of Lys and/or Arg containing in the peptides.

[0041] Cells

[0042] The cells used in the methods of the present invention can be prokaryotic or eukaryotic cells of any type, and are preferably animal cells, and more preferably are mammalian cells. Cells used in the methods of the present invention are most preferably human cells.

[0043] The cells used for identifying biomarkers can be from cell lines or primary cells. The inventors have found that using the methods of the present invention, it is possible to use as few as 10⁶ cells to identify differential expression between two cell types or two cell states. For optimal labeling of cells, the cells are preferably grown in heavy isotope media for at least six doublings to allow for greater than 98% incorporation of label. Thus, starting cultures can have as few as 2×10⁵ cells. This allows for the use of primary cells, such as cells from lines that have not been immortalized through genetic manipulation or have not otherwise become growth factor-independent. This also allows for the use of primary cell isolated directly from a subject, such as cells from tissue samples (including biopsy samples) in which the cell number is limited, to determine differences in protein expression in normal and disease state cells using SILAC methods. Primary cells can be taken from biopsied or sampled tissue or bodily fluids, and are preferably at least partially purified away from other sample components, including other cell types (“nontarget cells”), using, for example, the use of separation steps such as filtration, centrifugation, or selective precipitation; dissection of tissue (including but not limited to laser capture microdissection); affinity separation of components (such as by “panning” using affinity reagents such as antibodies directly or indirectly bound to a solid support such as beads to either remove undesirable sample components or enrich cells of interest); or the application of drugs or reagents to a culture that discourage the growth of nontarget cells.

[0044] In cases where primary cells are used, proteins expressed by primary disease-state cells can be compared in SILAC experiments with proteins expressed normal cells of a cell line, but preferably are compared with primary normal cells. The primary normal cells can be from the same or a different individual. Proteins expressed by primary normal cells can also be compared with proteins expressed by disease state cells of a cell line.

[0045] Isotopic Label

[0046] The isotopic labels used in the methods of the present invention can be any molecule that can be metabolically incorporated into protein within cells that has a non-natural abundance of one or more isotopes. As nonlimiting examples, heavy isotopes of carbon, nitrogen, oxygen, hydrogen, and sulfur that are of very low abundance in nature can be highly enriched in molecules used to label proteins (such as amino acids) such that, using mass spectrometry, proteins or peptides that have incorporated the heavy isotopes can be distinguished from corresponding proteins or peptides that have incorporate isotopes of the same element at their natural abundance, that is, “light” isotopes of the element.

[0047] Preferred labels are amino acids having non-naturally occurring levels of heavy isotopes, such as, but not limited to, carbon-13, nitrogen-15, oxygen-17, oxygen-18, sulfur-34, and hydrogen-2. An amino acid can be labeled with more than one isotope at a non-natural abundance, for example, an amino acid used in SILAC can have both carbon-13 and nitrogen-15. For a given cell labeling/MS detection experiment, one or more amino acids can be labeled with a non-natural abundance of one or more isotopes. In some preferred embodiments of the present invention, for example, Arg and Lys have incorporated heavy isotopes (such as ¹³C and/or ¹⁵N), and proteins are digested with trypsin prior to mass spectrometry. In these embodiments, each trypsin fragment of a protein of the labeled cell culture (with the exception of carboxy-terminal peptides) comprises a heavy isotope label.

[0048] In the methods of the present invention, protein levels of two cultures are compared by comparing heavy isotope-labeled proteins or peptides of one culture with light isotope containing proteins or peptides of the other culture. Preferably, in these methods, one of the cultures comprises a heavy isotope label, where the heavy isotope is at a non-natural abundance, and the other culture does not comprise an isotope label at a non-natural abundance. For example, the first culture can comprise in the media a metabolic precursor molecule that can become incorporated into biomolecules such as proteins within cells, in which the metabolic precursor molecule comprises an isotope at a non-natural abundance, and the second culture can comprise in the media the same metabolic precursor molecule, in which the precursor molecule does not comprise an isotope at a non-natural abundance. The metabolic precursor molecule can be, as nonlimiting examples, a sugar or amino acid. The isotope present at a non-natural abundance can be, for example a heavy isotope.

[0049] The heavy isotope label can be present in either the control cell culture or in the culture of disease state cells. In preferred embodiments in which the label is an amino acid that comprises one or more heavy isotopes, preferably the heavy isotope amino acid comprises essentially all of the amino acid in the cell culture to be labeled with heavy isotope. For example, where the label is ¹³C-Arg, preferably the culture media of the culture to be labeled contains ¹³C-Arg to the exclusion of ¹²C-Arg. Preferably, the cell culture that does not comprise a heavy isotope label at a non-natural abundance does not contain a detectable level of the heavy isotope.

[0050] Culturing Cells

[0051] Normal and disease state cells (or two cultures of stem cells to receive different treatments) are preferably cultured in parallel, in which either the normal cell culture media or the disease state cell culture media comprises a label in the form of an isotope at non-natural abundance. In some preferred embodiments, the normal cell culture media comprises a label in the form of an isotope at non-natural abundance, and the disease state culture media does not comprise a label in the form of an isotope at non-natural abundance. In other preferred embodiments, the disease state cell culture media comprises a label in the form of an isotope at non-natural abundance, and the normal cell culture media does not comprise a label in the form of an isotope at non-natural abundance. In other preferred embodiments, both cell cultures whose cells are being compared comprise isotopic label, where one cell culture comprises a first isotopic label, and the second cell culture comprises a second isotopic label.

[0052] In other embodiments, cells can be removed from a tissue, such as but not limited to a cancerous tissue such as a tumor, and grown in culture with an isotopic label. The cells can be combined with cells of the original tumor from patient biopsy for MS analysis to compare the abundance of proteins expressed by tumor cells grown in culture with the abundance of the same proteins expressed by tumor cells in the body. The comparison can be used to identify biomarkers for tumor cells that relate to the ability of the tumor to survive and grow within the body of a patient, such as but not limited to biomarkers that participate in the interaction of cancer cells with normal cells, such as biomarkers related to, for example, tissue infiltration, tumor vascularization, and nutrient procurement. Such biomarkers can be candidate drug targets.

[0053] Thus, the present invention provides a method of identifying proteins that enable, mediate, or facilitate tumor growth in the body. The method includes: providing a culture comprising cancer cells removed a tumor from a patient; allowing the tumor cells in the cell culture to divide in media that comprises at least one isotope at a non-natural level in a form that is metabolically incorporated into proteins within cultured cells; combining at least a portion of the cells of the cell culture with a sample of cells taken directly from the tumor to form a mixed cell sample; separating one or more proteins from the mixed cell sample; performing mass spectrometry on the one or more proteins, or peptides thereof, to obtain a mass spectrometry profile; and using the mass spectrometry profile to compare the abundance of at least one of the one or more proteins comprising the non-naturally occurring isotope with the abundance of the at least one of the one or more proteins that does not comprise the non-naturally-occurring isotope. In these methods, a difference in the abundance of the non-naturally occurring isotope form relative to the naturally occurring isotope form is indicative of a protein that enables, facilitates, or mediates the growth of tumor cells in the body.

[0054] Stem cells or progenitor cells can also be removed from an animal and grown in culture with an isotopic label. After growth in culture to incorporate label, the cells, or components of the cells, can be combined with cells or cell components taken directly from the animal for MS analysis to compare the abundance of proteins expressed by stem cells grown in culture with the abundance of the same proteins expressed by stem cells in the developing organism. The comparison can be used to identify biomarkers for stem cell differentiation, such as biomarkers related to in vivo cell-cell interaction, in vivo cell-substrate interaction, or in vivo response to cytokines. Such biomarkers can be used to dissect the differentiation pathway.

[0055] In these aspects, the invention provides methods for identifying proteins that mediate the differentiation of cells in the body. The methods include: providing a culture comprising stem cells removed a developing animal; allowing the stem cells in the cell culture to divide in media that comprises at least one isotope at a non-natural level in a form that is metabolically incorporated into proteins within cultured cells; combining at least a portion of the cells of the cell culture with a sample of cells taken directly from the animal to form a mixed cell sample, wherein the cells taken directly from the animal are derived from stem cells from the same type as the stem cells in the cell culture; separating one or more proteins from the mixed cell sample; performing mass spectrometry on the one or more proteins, or peptides thereof, to obtain a mass spectrometry profile; using the mass spectrometry profile to compare the abundance of at least one of the one or more proteins comprising the non-naturally occurring isotope with the abundance of the at least one of the one or more proteins that does not comprise the non-naturally-occurring isotope, wherein a difference in abundance of the non-naturally occurring isotope form from the naturally occurring isotope form is indicative of a protein that enables, facilitates, or mediates the differentiation of stem cells in the body.

[0056] Preferably the label is a heavy isotope of, for example, carbon, nitrogen, sulfur, oxygen, or hydrogen that is incorporated into an amino acid in the cell culture media used for labeling cells. Preferably the cell culture media used for labeling cells comprises one or more heavy isotope-labeled amino acids, in which greater than 95%, and even more preferably greater than 98%, of the one or more amino acids that are labeled comprise the heavy isotope.

[0057] For example, cells that are to be labeled with one or more particular amino acids that have one or more incorporated heavy isotopes can be grown in DMEM, RPMI, or any other suitable media to which the one or more heavy isotope amino acids have been added. Parallel cultures in which the proteins are not to be labeled with heavy isotope amino acids preferably are supplemented with the same amino acids as the labeled cultures, but in this case the amino acids do not comprise heavy isotopes. Preferably, the media and media supplements used to culture the cells do not contain the particular amino acids that are to be supplied to the cultures in heavy isotope form for labeling. For example, serum used for culturing the cells should be dialyzed to remove amino acids.

[0058] As nonlimiting examples, cells to be labeled can be grown in DMEM or RPMI medium to which dialyzed FBS has been added to a final concentration of 10%. The media can be supplemented with glutamine (where glutamine is not used as a labeled amino acid), and, optionally, pencillin and/or streptomycin at standard concentrations. Purified growth factors or cytokines can be supplemented to the media if they are essential to cell growth or desirable for the experiment being performed.

[0059] In these examples, the labeling media also contains 100 mg of at least one heavy isotope amino acid, such as, for example, [U—¹³C₆] L-Lysine, [U—¹³C₆] L-Arginine, or [U—¹⁵N₄, U—¹³C₆,] L-Arginine. (In one preferred embodiment, the media contains 100 mg/liter heavy Lys ([U—¹³C₆] L-Lysine) and 100 mg/liter heavy Arg ([U—¹⁵N₄, U—¹³C₆,] L-Arginine), such that peptides containing heavy Lys experience a shift of 6 Da relative to their unlabeled counterparts, and peptides containing heavy Arg experience a shift of 10 Da relative to their unlabeled counterparts.) The corresponding non-labeling media is supplemented with the same amounts of the same amino acids as the labeling media, but in this case in their light isotope form. For example, where the labeling media is supplemented with 100 mg per liter of each of heavy Arg and heavy Lys, the non-labeling media is supplemented with 100 mg per liter of each of non-heavy isotope Arg and non-heavy isotope Lys.

[0060] Cell are preferably grown in labeling media for at least six doublings. For example, a starting culture of 10⁵ cells can be grown to a final cell number of 6.4×10⁶ cells. This ensures essentially 100% incorporation of heavy isotope amino acids into proteins of the cells. Depending on the growth rate of the cells and the culture density, the cells can be split with light or heavy labeling medium separately.

[0061] To ensure 100% incorporation of heavy amino acids into proteins, small aliquots of cells (10⁵-b 10⁶) labeled with light or heavy amino acids can be removed and lysed separately in 500 μl of SDS sample buffer and analyzed by SDS-PAGE side by side. One or two protein bands are picked randomly, excised from the gel side by side, and subjected to in-gel tryptic digest, followed by the MALDI-TOF analysis. Alternatively, cells (10⁷) labeled with light or heavy amino acids can be lysed in cell lysis buffer separately. Proteins of interest can then be immunoprecipitated from the cell lysates and analyzed by SDS-PAGE side by side. Protein bands are excised, digested with trypsin, and then analyzed by MALDI-TOF in parallel. Compared to peptides labeled with light amino acids, peptides labeled with heavy amino acids should increase a few Daltons in mass depending on the nature of the heavy amino acids used for labeling (e.g. 6 Da for ¹³C labeled Lys and 10 Da for ¹³C, ¹⁵N double-labeled Arg). If only heavy ¹³C Lys is used for labeling, only peptides containing a Lys residue will shift 6 Da in mass, but peptides containing an Arg residue would have the same mass. In this way, before proceeding with an experiment, close to 100% incorporation of heavy amino acid into peptides can be verified, which means that no or a very little of corresponding light peptides should be detected in a peptide sample from cells labeled with heavy amino acids.

[0062] Mixing of Samples

[0063] In most applications of the method control cells and a disease state cells are mixed prior to performing any cell fractionation or protein separation steps. The mixing of control and disease state cells prior to further manipulation avoids sample-to-sample variation in the downstream steps leading to mass spectrometry that can lead to error in calculating relative abundances of proteins in the cultures being compared. In these procedures, aliquots of the two cell cultures being compared are preferably counted and equal numbers of control and disease-state cells are mixed together to form a mixed cell sample.

[0064] However, it may be desirable in some circumstances to mix cell organelles, cell lysates, extracts, or fractions after control and normal cell cultures have been separately lysed, and, optionally, subjected to one or more fractionation or separation steps. In these cases, equal amounts of the lysates, extracts, or fractions can be mixed after quantitating or measuring activity of one or more cellular components.

[0065] In methods of the present invention in which cell media is analyzed to detect secreted proteins, the cell supernatants are mixed. Preferably, aliquots of each cell culture are counted so that the amount of cell supernatants of the two cell cultures that are mixed together is standardized to the number of cells in each culture. It is also possible in this case to mix cell supernatants of each cell culture based on equal protein content of the cell supernatants, or equal amounts or activities of one or more components the cell supernatants.

[0066] Fractionating Cells/Separation of Proteins

[0067] To reduce the complexity of proteins subjected to MS and focus the search for differentially expressed proteins to a particular type of protein or cell compartment, it is generally desirable to fractionate cells, separate proteins, or both, prior to performing mass spectrometry.

[0068] In some embodiments of the present invention, a biomarker can be identified as a biomolecule in which the abundance of the biomarker in a given cell compartment or fraction differs between disease state and normal cells, or between cultures of disease state cells or stem cells that receive different treatments. For example, as described in Example 1, osteoblast specific factor 2 (OSF-2; Genbank gi 46576887, SEQ ID NO:79), a biomarker identified using the methods of the present invention, is detected in the nucleus of noncancerous breast cells and on the cell membranes of breast cancer cells.

[0069] Depending on the cell compartment to be analyzed, after harvesting, cells can be lysed in different buffers or solutions. Preferably the lysis buffers comprise protease inhibitors to preserve protein integrity and nucleases to remove nucleic acids. Cell lysis buffers and solutions can vary in their components and can be optimized for the type of protein or cell compartment to be analyzed using SILAC/MS. For example, to analyze abundances of membrane proteins, cells can be lysed in a buffer containing a hypotonic buffer. One example of a hypotonic lysis buffer is 10 mM Tris, pH 7.4, 1 mM MgCl₂, 10 units per milliliter benzonase, 0.5 mM PMSF, 0.15 micromolar aprotinin, and 1 micromolar leupeptin hemisulfate. For the isolation of cytosolic proteins, cells can optionally be lysed in buffers containing nonionic detergents, ionic detergents, or a combination thereof. One example of a buffer for cell lysis contains 50 mM Tris-HCl, pH 8, 1% NP-40, 150 mM NaCl, 1 mM Na₃VO₄, 10 mM NaF, 0.15 micromolar aprotinin, and 1 micromolar leupeptin hemisulfate. Another example of a buffer for cell lysis contains 50 mM Tris-HCl, pH 8, 1% TritonX-100, 0.5% deoxycholate, 0.1% SDS, 500 mM NaCl, 1 mM Na₃VO₄, 10 mM NaF, 0.15 micromolar aprotinin, and 1 micromolar leupeptin hemisulfate.

[0070] Cell fractionation can be used to investigate different abundance of proteins of a cell compartment of interest, such as, for example, the cytosol, the nucleus, the mitochondria, cell membranes, cytoskeleton, etc. Cell fractionation methods are well known in the cell biology, and can include zonal or gradient centrifugation, selective lysis of membrane components, filtration, etc.

[0071] Many membrane proteins mediate the response of the cell to external factors, such as growth factors, hormones, other cells, and cell substrates. Therefore, the separation of cell membranes for investigating differences in abundance of membrane proteins between normal cells and disease state cells is of particular interest. In addition to serving as biomarkers, membrane proteins identified as being differentially expressed in a disease state can be candidate drug targets.

[0072] Methods of isolating cell membranes are well-known in cell biology. Cell membrane isolation can be performed, for example, by hypotonic lysis of cells and removal of nuclei by centrifugation. Cell membranes (or microsomes) can be recovered by ultracentrifugation. The pelleted membranes can be solubilized in a detergent-containing buffer, and the proteins can be separated using PAGE.

[0073] In some cases it may be desirable to isolate peripheral membrane proteins. In this case cell membranes isolated by ultracentrifugation can be salt-extracted or treated with low concentrations of mild detergents to remove membrane-associated proteins.

[0074] In some methods of the present invention, the cell media is analyzed for secreted proteins. In these embodiments, the cell cultures are harvested, equivalent amounts of each of the cultures are mixed (for example, based on cell counts), and cells are pelleted. The cell media supernatant is recovered for enrichment of secreted proteins. Proteins of the supernatant can be concentrated, for example by ultrafiltration or dialysis.

[0075] Proteins isolated from cell media or cell fractions can be separated to reduce the complexity of the samples analyzed by mass spectrometry. Separation of proteins can be, for example, by affinity capture, selective solubilization, selective precipitation, chromatography, or electrophoresis. Affintiy capture can be used to separate a single protein or protein family, epitope tagged proteins, or a broad class or proteins, such as, for example, proteins containing phosphotyrosine. Chromatography can be affinity chromatography, or can separate proteins based on size, charge, or hydrophobicity. Chromatographic separation can be coupled to mass spectrometry, as described below, to sequentially analyze fractions as they elute from a column matrix. Electrophoresis, such as PAGE, can be used to separate proteins based on size. PAGE can be under denaturing or nondenaturing conditions, or two-dimensional PAGE can be performed. After electrophoresis, a gel lane comprising separated proteins can be divided into slices. Proteins extracted from each of the slices or any subset of the slices can be analyzed separately using mass spectrometry.

[0076] For identification of proteins using SILAC, the proteins are preferably digested into peptides prior to mass spectrometry. Proteins can be digested using any protease or chemical peptide cleavage reagent that generates peptides of from about 5 to about 200 amino acids. Examples of proteases that can be used include trypsin, V-8 protease, pepsin, subtilisin, proteinase 1c, and tobacco etch virus protease. Cyanogen bromide can also be used. Trypsin is preferred in some embodiments of the present invention in which arginine and lysine are isotopically labeled amino acids. In these embodiments, because trypsin digests proteins C-terminal to arg and lys residues, each trypsin fragment (except for carboxy terminal fragments of proteins) will have an isotopic label.

[0077] A General Tryptic Digest Protocol is as Follows:

[0078] To avoid contamination with keratin, gel manipulation and digestion steps are performed in a laminar flow hood. Protein bands of interest are excised, along with positive and negative controls, and at least one blank from the SDS-PAGE gel. NuPAGE® Novex® acrylamide gels, available from Invitrogen (Carlsbad, Calif., USA) are recommended for protein separation. Each band/or spot is chopped into small (approx 1 mm diameter) particles with a clean pipette tip. The gel pieces are transferred to a clean microcentrifuge tube. Microtubes from Axygen (Union City, Calif.) or Eppendorf (Hamburg, Germany) are recommended. The gel pieces are destained two to three times with 40% acetonitrile in 25 mM NH₄HCO₃ (pH 8.0) until no blue hue is observed. The gel pieces are dehydrated with 100% acetonitrile and dried for 5 min with a Speed Vac lyophilizer (Savant).

[0079] About 10 μl of cold 10 ng/ml proteomics-grade trypsin in 25 mM NH₄HCO₃ (pH 8.0) is added to the dried gel pieces. The gel pieces are incubated on ice for 1 to 2 hr as they swell to minimize auto proteolysis as the trypsin soaks into the gel. Just enough trypsin solution is added to cover the gel pieces. The microcentrifuge tube is covered with aluminum foil to ensure uniform heating, and the gel pieces are incubated overnight at 37° C.

[0080] Approximately 30 μl of 1.5% TFA is added to the tryptic digestion mix and incubated at room temperature for about 30 min. The tubes are vortexed about 1 min, centrifuged briefly, and the peptide extract is transferred into a clean tube (Axygen or Eppendorf microcentrifuge tubes are recommended). The gel pieces are further extracted with 30 to 50 μl of 50% acetonitrile in 0.75% TFA for 30 min. and vortexed for about 1 min. The peptide extracts are combined and analyzed by MALDI-TOF. For LC-ESI/MS analysis, the peptide extract should be dried under vacuum and the peptides resuspended in 20 μl of 10% acetonitrile in 0.1% formic acid. Alternatively, 2% formic acid can be used in place of TFA in the steps above.

[0081] Mass Spectrometry

[0082] In various aspects, the invention is drawn to mass spectroscopy. As used herein, the term “mass spectrometry” (or simply “MS”) encompasses any spectrometric technique or process in which molecules are ionized and separated and/or analyzed based on their respective molecular weights. Thus, as used herein, the terms “mass spectrometry” and “MS” encompass any type of ionization method, including without limitation electrospray ionization (ESI), atmospheric-pressure chemical ionization (APCI) and other forms of atmospheric pressure ionization (API), and laser irradiation. Mass spectrometers are commonly combined with separation methods such as gas chromatography (GC) and liquid chromatography (LC). GC or LC separates the components in a mixture, and the components are then individually introduced into the mass spectrometer; such techniques are generally called GC/MS and LC/MS, respectively. MS/MS is an analogous technique where the first-stage separation device is another mass spectrometer. In LC/MS/MS, the separation methods comprise liquid chromatography and MS. Any combination (e.g., GC/MS/MS, GC/LC/MS, GC/LC/MS/MS, etc.) of methods can be used to practice the invention. In such combinations, “MS” can refer to any form of mass spectrometry; by way of non-limiting example, “LC/MS” encompasses LC/ESI MS and LC/MALDI-TOF MS. Thus, as used herein, the terms “mass spectrometry” and “MS” include without limitation APCI MS; ESI MS; GC MS; MALDI-TOF MS; LC/MS combinations; LC/MS/MS combinations; MS/MS combinations; etc.

[0083] HPLC and RP-HPLC

[0084] It is often necessary to prepare samples comprising an analyte of interest for MS. Such preparations include without limitation purification and/or buffer exchange. Any appropriate method, or combination of methods, can be used to prepare samples for MS. One preferred type of MS preparative method is liquid chromatography (LC), including without limitation HPLC and RP-HPLC.

[0085] High-pressure liquid chromatography (HPLC) is a separative and quantitative analytical tool that is generally robust, reliable and flexible. Reverse-phase (RP) is a commonly used stationary phase that is characterized by alkyl chains of specific length immobilized to a silica bead support. RP-HPLC is suitable for the separation and analysis of various types of compounds including without limitation biomolecules, (e.g., glycoconjugates, proteins, peptides, and nucleic acids, and, with mobile phase supplements, oligonucleotides). One of the most important reasons that RP-HPLC has been the technique of choice amongst all HPLC techniques is its compatibility with electrospray ionization (ESI). During ESI, liquid samples can be introduced into a mass spectrometer by a process that creates multiple charged ions (Wilm et al., Anal. Chem. 68:1, 1996). However, multiple ions can result in complex spectra and reduced sensitivity.

[0086] In HPLC, peptides and proteins are injected into a column, typically silica based C18. An aqueous buffer is used to elute the salts, while the peptides and proteins are eluted with a mixture of aqueous solvent (water) and organic solvent (acetonitrile, methanol, propanol). The aqueous phase is generally HPLC grade water with 0.1% acid and the organic solvent phase is generally an HPLC grade acetonitrile or methanol with 0.1% acid. The acid is used to improve the chromatographic peak shape and to provide a source of protons in reverse phase LC/MS. The acids most commonly used are formic acid, triflouroacetic acid, and acetic acid. In RP HPLC, compounds are separated based on their hydrophobic character. With an LC system coupled to the mass spectrometer through an ESI source and the ability to perform data-dependant scanning, it is now possible in at least some instances to distinguish proteins in complex mixtures containing more than 50 components without first purifying each protein to homogeneity. Where the complexity of the mixture is extreme, it is possible to couple ion exchange chromatography and RP-HPLC in tandem to identify proteins from mixtures containing in excess of 1,000 proteins.

[0087] MALDI-TOF MS

[0088] A particular type of MS technique, matrix-assisted laser desorption time-of-flight mass spectrometry (MALDI-TOF MS) (Karas et al., Int. J. Mass Spectrom. Ion Processes 78:53, 1987), has received prominence in analysis of biological polymers for its desirable characteristics, such as relative ease of sample preparation, predominance of singly charged ions in mass spectra, sensitivity and high speed. MALDI-TOF MS is a technique in which a UV-light absorbing matrix and a molecule of interest (analyte) are mixed and co-precipitated, thus forming analyte:matrix crystals. The crystals are irradiated by a nanosecond laser pulse. Most of the laser energy is absorbed by the matrix, which prevents unwanted fragmentation of the biomolecule. Nevertheless, matrix molecules transfer their energy to analyte molecules, causing them to vaporize and ionize. The ionized molecules are accelerated in an electric field and enter the flight tube. During their flight in this tube, different molecules are separated according to their mass to charge (m/z) ratio and reach the detector at different times. Each molecule yields a distinct signal. The method is used for detection and characterization of biomolecules, such as proteins, peptides, oligosaccharides and oligonucleotides, with molecular masses between about 400 and about 500,000 Da, or higher. MALDI-MS is a sensitive technique that allows the detection of low (10⁻¹⁵ to 10⁻¹⁸ mole) quantities of analyte in a sample.

[0089] Partial amino acid sequences of proteins can be determined by enzymatic proteolysis followed by MS analysis of the product peptides. These amino acid sequences can be used for in silico examination of DNA and/or protein sequence databases. Matched amino acid sequences can indicate proteins, domains and/or motifs having a known function and/or tertiary structure. For example, amino acid sequences from an uncharacterized protein might match the sequence or structure of a domain or motif that binds a ligand. As another example, the amino acid sequences can be used in vitro as antigens to generate antibodies to the protein and other related proteins from other biological source material (e.g., from a different tissue or organ, or from another species). There are many additional uses for MS, particularly MALDI-TOF MS, in the fields of genomics, proteomics and drug discovery. For a general review of the use of MALDI-TOF MS in proteomics and genomics, see Bonk et al. (Neuroscientist 7:12, 2001).

[0090] Tryptic peptides labeled with light or heavy amino acids can be directly analyzed using MALDI-TOF. However, where sample complexity is apparent, on-line or off-line LC-MS/MS or two-dimensional LC-MS/MS is necessary to separate the peptides. For example, for simple digests, a gradient of 5-45% (v/v) acetonitrile in 0.1% formic acid (or TFA, if MALDI MS/MS is available) over 45 min, and then 45-95% acetonitrile in 0.1% formic acid (or TFA, if MALDI MS/MS is available) over 5 min can be used. 0.1% Formic acid solution is used on the Q-TOF instrument and 0.1% TFA solution is used on the Dionex Probot fraction collector for off-line coupling between HPLC and MALDI-MS/MS analysis (carried out on the ABI 4700). For a complex sample, a gradient of 5-45% (v/v) acetonitrile over 90 min, and then 45-95% acetonitrile over 30 min is used. For a very complex sample, a gradient of 5-45% (v/v) acetonitrile over 120 min, and then 45-95% acetonitrile over 60 min might be used. On the Q-TOF, one survey scan and four MS/MS data channels are used to acquire CID data with 1.4 s scan time. On the 4700 proteomics, the most intense eight peptides with mass over 1000 are chosen for MS/MS analysis.

[0091] Identification of Biomarkers

[0092] Software programs such as MSQuant can be used for quantification of protein expression (msquant. sourceforge.net).

[0093] Biomarkers are identified as proteins having an abundance in disease state cells that is either greater than or less than that in normal cells, or having an abundance in a given cellular compartment or fraction of disease state cells that is greater or less than that in the same cellular compartment or fraction of normal cells. The amount by which the abundance of a protein can differ between disease state and normal cells to be identified as a biomarker, for example, can be greater than 20%, greater than 30%, greater than 50%, greater than 70%, greater than 90%, or greater than 100%. For example, a biomarker can be an identified protein whose abundance in disease state cells is at least 200% (or 2-fold) greater than or less than its abundance in normal cells. In other cases, a biomarker can be an identified protein whose abundance in disease state cells is at least 300% (or 3-fold) greater than or less than its abundance in normal cells. In yet other cases, a biomarker can be an identified protein whose abundance in disease state cells is at least 500% (or 5-fold) greater than or less than its abundance in normal cells.

[0094] A protein identified as a biomarker can be a previously characterized protein or a protein that has not been previously characterized. Preferably, mass spectrometry analysis provides amino acid sequence of peptides of proteins that differ in abundance between normal and disease state cultures, and such amino acid sequences can be compared with nucleic acid and protein sequence databases. Where antibodies are unavailable for characterized or uncharacterized proteins, they can be generated using methods known in the art using synthetic peptides or recombinant or purified protein. Such antibodies can be used to validate biomarkers as well as for detection of biomarkers in tissues samples.

[0095] An advantage of using SILAC/MS to identify biomarkers of disease state cells is that the method provides an extensive, and, in principle, complete profile of the proteins expressed by cells that belong to the class of proteins targeted in the separation methods (for example, membrane proteins, phosphoproteins, nuclear proteins). Thus, using the methods of the present invention users can identify multiple biomarkers for a disease state. The identification of multiple biomarkers can allow for more reliable detection methods, where cells of a disease state can be identified, and potentially classified, by analysis of expression levels of multiple proteins.

[0096] Biomarkers can be validated by confirming expression differences between normal and disease state cells using methods of detecting protein levels other than SILAC. For example, protein level comparisons can be performed using immunocytochemistry, Western blot, immunoprecipitation, ELISA, or other antibody binding and detection methods.

[0097] The invention also includes antibodies to biomarkers identified using the methods disclosed herein, including the proteins listed in Table 1 and Table 2. Methods of generating antibodies to proteins are well known in the art. For example, polyclonal antibodies may be isolated and purified from vaccinated animals using procedures well-known in the art (for example, see Harlow et al., Antibodies: A Laboratory Manual, Cold Spring Harbor Laboratory Press, 1988).

[0098] Antibodies of the invention can also be monoclonal antibodies generated against proteins identified using the methods disclosed herein, such as the proteins listed in Table 1 and Table 2. For example, monoclonal antibodies can be produced following the procedure of Kohler and Milstein (Nature 256:495-497 (1975) (for example, see Harlow et al., supra). Briefly, monoclonal antibodies can be produced by immunizing mice with a biomarker protein, such as a protein of Table 1 or Table 2, verifying the presence of antibody production by removing a serum sample and testing for reactivity against the biomarker protein, removing the spleen to obtain B-lymphocytes, fusing the B-lymphocytes with myeloma cells to produce hybridomas, cloning the hybridomas, selecting positive clones which produce anti-biomarker antibody, culturing the anti-biomarker antibody-producing clones, and isolating anti-biomarker antibodies from the hybridoma cultures.

[0099] Antibodies of the invention can also be antibody fragments that specifically bind the proteins identified using the methods disclosed herein, such as the proteins listed in Table 1 and Table 2.

[0100] Antibodies of the invention also include engineered antibodies, including, without limitation, humanized antibodies, single-chain antibodies, and recombinant antibodies optimized through phage display. In some embodiments antibodies or antibody fragments can be isolated from antibody phage libraries generated, for example using the techniques described in McCafferty et al. (1990) Nature 348: 552-554, using the antigen of interest (such as a biomarker identified by the methods provided herein) to select for a suitable antibody fragment. Clackson et al. (1991) 352: 624-628 and Marks et al. (1991) J. Mol. Biol. 22: 581-597 describe the isolation of murine and human antibodies, respectively, using phage libraries. Subsequent publications describe the production of high affinity (nanomolar range) human antibodies by chain shuffling (Mark et al. (1992) Bio Technol. 10: 779-783), as well as combinatorial infection and in vivo recombination as a strategy for constructing very large phage libraries (Waterhouse et al. (1993) Nuc. Acids Res. 21: 2265-2266). The invention includes bacterial lines comprising phage libraries and phage clones of antibodies generated against biomarkers of the invention, such as the biomarkers listed in Table 1 and Table 2. The invention includes eukaryotic and bacterial lines comprising nucleic acid constructs encoding antibodies generated against biomarkers of the invention, such as the biomarkers listed in Table 1 and Table 2.

[0101] The invention encompasses antibodies that specifically bind the proteins of Table 1 and Table 2, and hybridoma cell lines, bacterial cell lines, and phage that produce antibodies that specifically bind the proteins of Table 1 and Table 2. The invention also encompasses nucleic acid constructs that encode antibodies that specifically bind proteins of Table 1 and Table 2.

[0102] In one aspect, the invention includes an antibody that specifically binds a protein of Table 2 that display a five-fold or greater difference in expression in breast cancer cells when compared with normal cells, such as annexin V chain c (SEQ ID NO:7; Genbank gi 809190), epididymal protein (SEQ ID NO:17; Genbank gi 23092553), glutaminase (SEQ ID NO:19; Genbank gi 12044394), inter-alpha-trypsin inhibitor heavy chain 3 precursor (SEQ ID NO:25; Genbank gi 3024064), alpha 2 macroglobulin (SEQ ID NO:29; Genbank gi 224053), membrane alanine aminopeptidase precursor (SEQ ID NO:30; Genbank gi 37590640; Genbank gi 4502095), type-2 phosphatidic acid phosphohydrolase (SEQ ID NO:33; Genbank gi 3015569), pregnancy zone protein precursor (SEQ ID NO:36; Genbank gi 131756), transglutaminase 2 isoform a/transglutaminase C (SEQ ID NO:42; Genbank gi 39777597), the unnamed protein product having a sequence with NCBI database Genbank gi 7023123 (SEQ ID NO:47), autoantigen p542 (SEQ ID NO:55; Genbank gi 3334899), the 34 kD nucleolar sclerodema antigen (SEQ ID NO:71; Genbank gi 3399667), lysosomal proteinase cathepsin b (SEQ ID NO:74; Genbank gi 181178), osteoblast-specific factor 2 (SEQ ID NO:79; Genbank gi 46576887), SP—H antigen (SEQ ID NO:84; Genbank gi 743447), thyroid-lupus autoantigen p70 (SEQ ID NO:91; Genbank gi 4503841), the unnamed protein product having NCBI database Genbank gi 32097 (SEQ ID NO:96), the unnamed protein product having NCBI database Genbank gi 7022744 (SEQ ID NO:97), the unnamed protein product having NCBI database Genbank gi 21749696 (SEQ ID NO:98), a hypothetical protein (mago-nashi homolog) having NCBI database Genbank gi 15012020 (SEQ ID NO:107), a hypothetical protein (LS1-like) having NCBI database Genbank gi 15778927 (SEQ ID NO:108), a protein (human mRNA, complete cds gene product) having NCBI database Genbank gi 348239 (SEQ ID NO:109), FTSJ3 protein (SEQ ID NO:110; Genbank gi 62914003), a predicted protein (similar to RIKEN cDNA 0610009D07) having NCBI having database Genbank gi 50745107(SEQ ID NO:111), chromosome segregation protein smc1 (SEQ ID NO:119; Genbank gi 2135244), CPSF6 protein (SEQ ID NO:123; Genbank gi 12653847), DNA-activated protein kinase (SEQ ID NO:167; Genbank gi 32140473) and DNA-activated protein kinase catalytic subunit (SEQ ID NO:126; Genbank gi 38258929), activating signal cointegrator 1 complex subunit 3-like 1 (SEQ ID NO:130; Genbank gi 40217847), heterogeneous nuclear ribonucleoprotein M, (SEQ ID NO:133; Genbank gi 55977747) a protein similar to small nuclear ribonucleoprotein D1 having NCBI database Genbank gi 34877889 (SEQ ID NO:142), histone deacetylase 2 (SEQ ID NO:144; Genbank gi 4557641), histone H1b (SEQ ID NO:146; Genbank gi 356168), histone H2A.5 (SEQ ID NO:152; Genbank gi 70686), a protein similar to histone H3 having NCBI database Genbank gi 30156584 (SEQ ID NO:153), histone H3 (SEQ ID NO:158; Genbank gi 386772), histone H4 (SEQ ID NO:159; Genbank gi 223582), nucleolar protein NOP5/NOP58 (SEQ ID NO:107; Genbank gi 17380155; SEQ ID NO:164; Genbank gi 21595782), PTB-associated splicing factor (SEQ ID NO:168; Genbank gi 38458), or SmB/B′ autoimmune antigen (SEQ ID NO:180; Genbank gi 36495). In some preferred embodiments, breast cancer can be detected in a subject by detecting the expression level of one or more of the proteins of Table 2 that display a five-fold or greater difference in expression in breast cancer cells when compared with normal cells.

[0103] The antibodies of the invention can be used in detection of biomarkers, relative or absolute quantitation of biomarkers, diagnosis of a disease state (such as diagnosis of cancer), cancer typing, cancer staging, or prognosis. Detection of biomarkers can be by immunoassays of any type, which can be performed in solution phase (for example, ELISA protocols) or on a substrate, such as a membrane, slide, or bead. Immunoassays are well know in the art. Various methods of generating antibodies and methods for immunoassays are disclosed, for example, in U.S. Pat. No. 6,828,110; U.S. Pat. No. 6,828,110; U.S. Pat. No. 6,828,110; U.S. Pat. No. 6,218,109; U.S. Pat. No. 5,849,508; and U.S. Pat. No. 5,693,778; all herein incorporated by reference in their entireties.

[0104] Biomarkers can also be validated by detecting differences in levels of nucleic acids that encode the biomarker proteins. Such detection can be, for example, by Northern blot, microarray hybridization, RT-PCR or other polymerase-based assays, CISH, or FISH. Biomarkers can be validated in the same cells used in the SILAC experiments used to identify the biomarkers, but preferably biomarkers are validated in a plurality of cell isolates, and preferably one or more of the cell isolates used to validate the biomarkers is different from the cell isolates used to identify the biomarkers using SILAC. Biomarkers identified in cancer cell fractions (including cytosolic, nuclear, or membrane fractions) using SILAC, as well as biomarkers found to be present in the cell media, can also validated by testing for their presence in patient sera, blood, plasma, lymphatic fluid aspirates or lavages.

[0105] Diagnosis of Disease Using Biomarkers

[0106] The abundance of one or more biomarkers in a biological sample can be correlated with a disease state, such as cancer. An altered expression pattern of one or more biomarkers in a biological sample can be correlated with the correlated with disease, such as cancer. The altered expression pattern can be, as nonlimiting examples, a different subcellular localization or post-translational modification.

[0107] One or more biomarkers of a disease state identified using the methods of the present invention can be detected in a plurality of biological samples in which cells of the tissue have been confirmed as having a particular disease state. Preferably, the abundance or subcellular localization of the biomarkers in disease tissue is evaluated at the same times as the abundance of the biomarkers in biological samples of non-disease tissue. Statistical analysis can be performed to determine correlates of the abundance of particular biomarkers with the disease state.

[0108] For example, as described in Example 1, the methods of the present invention have been used to identify breast cancer biomarkers. The example demonstrates the identification of biomarkers for cancer using cultures of normal and pathological cells grown in media that differs by the inclusion in one culture of heavy isotope-containing metabolic precursors and mass spectrometry to compare the relative abundance of large numbers of proteins. The abundance of such biomarkers in biological samples taken from breast cancer patients and sample of non-cancerous breast tissue can be determined using any reliable detection methods, including those disclosed herein.

[0109] Correlation of Biomarkers with Disease Type, Stage, Prognosis, and Response to Therapy

[0110] The abundance of one or more biomarkers in a biological sample can be correlated with a type, stage, or prognosis of a disease that the biomarker is indicative of. The abundance of a biomarker in a biological sample can also be correlated with response of the disease to particular therapies, such as drugs. One or more biomarkers of a disease state identified using the methods of the present invention can be detected in plurality of biological samples in which cells of the tissue have been confirmed as having a particular disease state, and have been classified according to one or more of disease type, disease stage, disease prognosis, or response of the patient to a given treatment. Preferably, the abundance of the biomarkers in disease tissue is evaluated at the same times as the abundance of the biomarkers in biological samples of non-disease tissue. Statistical analysis can be performed to determine correlates of the abundance of particular biomarkers with these parameters.

[0111] For example, as described in Example 1, the methods of the present invention have been used to identify breast cancer biomarkers. Seventy-five proteins were identified as having a three-fold or greater abundance in breast cancer cells than in normal breast cells. As depicted in FIG. 7 and Table 5, biomarkers osteoblast specific factor-2 (OSF-2) (SEQ ID NO:79, Genbank gi 46576887), DNA-activated protein kinase (SEQ ID NO:167, Genbank gi 32140473), membrane alanine aminopeptidase (CD13) (SEQ ID NO:30; Genbank gi 37590640) and alpha-2 macroglobulin (SEQ ID NO:29; Genbank gi 224053) tested by antibody staining of tissue or Western blot of normal breast tissue and breast cancer cells were found to have altered expression in breast cancer cells when compared with normal breast cells. Thus, the detection of biomarkers using SILAC is reliable and verifiable using other methods for comparison of expression levels or patterns.

[0112] The abundance of such biomarkers in biological samples taken from breast cancer patients can be determined using any reliable detection methods, including those disclosed herein. The National Cancer Institute maintains the Cooperative Breast Cancer Tissue Resource (www.cbctr.nci.nih.gov) to supply researchers with primary breast cancer tissues and associated clinical data. Analysis of expression of breast cancer biomarkers, such as those disclosed herein, can be examined in tissues of this tissue bank, for example, and correlated with pathological and clinical information that is available. Such correlates can be used for diagnosing, typing, and staging of cancer using biomarker detection on biological samples of patients known to have or suspected of having cancer. Such correlates can also be used for determining the probability of response of the patient to anticancer agents and a prognosis.

[0113] Biomarkers of a disease state identified using SILAC/MS can also be candidate drug targets. Proteins that are overexpressed in a disease state cell, such as a cancer cell, can also be used for drug targeting. This is particularly relevant to biomarkers for disease state cells identified after isolation of cell membranes. Immunohistochemistry demonstrates that OSF-2 is expressed on the cell membrane of cancer cells, whereas OSF-2 is not found on the cell membrane of normal cells, but rather can be detected in nuclei. The present invention allows identification of proteins that are expressed differentially in particular cellular compartments, such as the cell membrane. Proteins that are overexpressed in cell membranes of cancer cells with respect to normal cells, for example, can be used to develop affinity reagents for the cancer cell membrane proteins that can be conjugated to anticancer drugs.

[0114] In another application, biomarkers identified by SILAC/MS using stem cell cultures can be used to determine the differentiation state of cells, such as but not limited to stem cells used for therapeutic purposes.

Illustrative Biomarkers

[0115] Illustrative biomarkers of present invention include those whose expression levels is discovered to differ by at least two-fold between breast cancer cells and normal breast cells. Such biomarkers are listed in Table 1. More preferred biomarkers that differ by at least three-fold between breast cancer cells and normal breast cells. Such biomarkers are listed in Table 2. Some exemplary biomarkers include breast cancer biomarkers osteoblast specific factor-2 (OSF-2) (SEQ ID NO:79, Genbank gi 46576887), DNA-activated protein kinase (SEQ ID NO:167, Genbank gi 32140473), membrane alanine aminopeptidase (CD13) (SEQ ID NO:30; Genbank gi 37590640) and alpha-2 (macroglobulin SEQ ID NO:29; Genbank gi 224053).

[0116] The proteins whose differential expression by breast cancer and normal breast cells was demonstrated by the methods of the invention were identified by database searching. Thus the names of the proteins may include “precursor” or “isoform” because these reflect the title of the sequence entries in the sequence database. The biomarkers of the invention are not limited to particular forms of these proteins, however, and encompass all forms of a protein encoded at a particular locus by a particular gene that encodes a protein listed herein. A biomarker of the invention thus includes a protein listed in Table 1 or Table 2 and includes alternative isoforms, processed forms, and post-translationally modified forms of the listed proteins.

II. Use of Biomarkers in Detecting Protein Expression in Disease State Cells

[0117] Biomarkers for a disease state identified by the methods disclosed herein can be used to detect expression of proteins in cells of a disease state, such as, but not limited to, cancer cells. For example, as outlined in Section I, above, disease state cells such as cancer cells and normal cells of the same type can be grown in parallel cultures, in which either the disease state cell culture or the normal cell culture contains one or more heavy isotope amino acids. After growth of cells in culture, such that essentially all of the protein in the heavy isotope culture is labeled, equal numbers of the cells can be mixed, and the cells can be subjected to cell fractionation, protein separation, and protein digestion. Peptides resulting from protein digestion of the pooled cell culture samples can be analyzed by mass spectrometry and, preferably, multiple biomarkers can be identified in which the biomarker is present at different level in disease state cells and normal cells.

[0118] In further experiments, one or more of the identified biomarkers can be detected in one or more biological test samples, such as tissue samples or bodily fluid samples. The sample can be a tumor biopsy sample, a blood, plasma, or serum sample, lymphatic fluid, saliva, a lung aspirate, a nipple aspirate, breast duct lavage sample, a pelvic lavage sample, a swab or scraping, etc. The sample need not be of the same tissue that was used to identify biomarkers using SILAC. For example, biomarkers that are overexpressed in cancer cells relative to normal cells that are localized within cancer cells or in or on the cell membranes of cancer cells may be detected in the blood or lymph, and thus blood, plasma, serum, and lymphatic fluid can be used to detect a disease state by detecting the presence of one or more biomarkers. Fluid samples used to harvest cells, cell fragments, and proteins at or near the site of a tumor (such as aspirates or lavages) can also be samples for detecting one or more biomarkers to diagnose a disease state. In some preferred embodiments, the biological test sample is a biological sample from a subject suspected of having breast cancer, for example, a serum sample, a breast tumor biopsy sample, a nipple aspirate, or a breast duct lavage sample.

[0119] The present invention also includes methods of detecting one or more biomarkers expressed by a cancer cell, where the biomarker is a protein of Table 1, or a nucleic acid encoding at least a portion of a protein of Table 1, comprising detecting in a biological sample of a patient known to have or suspected of having cancer, an expression level of a protein of Table 1, or a nucleic acid encoding the protein of Table 1, wherein an altered expression level in the biological sample compared to the expression level in a normal sample is indicative of a cancerous state. Biomarkers identified by the methods of the present invention are not limited to proteins having the database sequences of the identified biomarker protein, but also include proteins encoded by the same gene at the same chromosomal locus as the identified biomarker. Thus, detecting a biomarker of Table 1 also includes detecting a protein encoded by allelic variants of those identified as encoding the proteins listed in Table 1, or protein variants resulting from one or more mutations or from alternative splicing of the encoding gene, or proteins differing from the proteins listed in Table 1 in post-translational modifications, including but not limited to proteolytic processing.

[0120] Data provided herein identifies the proteins of Table 1 as being proteins that are differentially expressed in human breast cancer cells. Accordingly, provided herein is a method of detecting one or more biomolecules, comprising detecting in a biological sample, expression of a protein of Table 1, or a nucleic acid encoding a protein of Table 1, wherein said biological sample is a sample of a patient with a breast pathology. The biological sample can be, for example, a tumor biopsy sample or a breast tumor biopsy sample. Furthermore, the sample can be a fluid sample. For example, sample of blood, plasma, serum, urine, saliva, lymphatic fluid, pelvic lavage, lung aspirate, nipple aspirate, or breast duct lavage.

[0121] In certain aspects of the invention, expression is detected of two or more, three or more, four or more, five or more, six or more, seven of more, eight or more, nine or more, ten or more, twenty-five or more, one-half, one-third, or all of the proteins of Table 1, or of nucleic acids encoding two or more, three or more, four or more, five or more, six or more, seven of more, eight or more, nine or more, ten or more, twenty-five or more, one-half, one-third, or all of the proteins of Table 1.

[0122] In some illustrative aspects, expression is detected for one or more proteins of Table 2, or nucleic acids encoding one or more proteins of Table 2. Furthermore, in certain aspects of the invention, expression is detected of two or more, three or more, four or more, five or more, six or more, seven of more, eight or more, nine or more, ten or more, twenty-five or more, one-half, one-third, or all of the proteins of Table 2, or of nucleic acids encoding two or more, three or more, four or more, five or more, six or more, seven of more, eight or more, nine or more, ten or more, twenty-five or more, one-half, one-third, or all of the proteins of Table 2.

[0123] Furthermore, expression can be detected for one or more, two or more, three or more, four or more, five or more, six or more, seven of more, eight or more, nine or more, ten or more, twenty-five or more, one-half, one-third, or all of the following proteins, or nucleic acids encoding the protein(s): annexin V chain c (SEQ ID NO:7), epididymal protein (SEQ ID NO:17), glutaminase (SEQ ID NO:19), inter-alpha-trypsin inhibitor heavy chain 3 precursor (SEQ ID NO:25), alpha 2 macroglobulin (SEQ ID NO:29), membrane alanine aminopeptidase precursor (SEQ ID NO:30), type-2 phosphatidic acid phosphohydrolase (SEQ ID NO:33), pregnancy zone protein precursor (SEQ ID NO:36), transglutaminase 2 isoform a/transglutaminase C (SEQ ID NO:42), the unnamed protein product having a sequence with NCBI database Genbank gi 7023123 (SEQ ID NO:47), autoantigen p542 (SEQ ID NO:55), the 34 kD nucleolar sclerodema antigen (SEQ ID NO:71), lysosomal proteinase cathepsin b (SEQ ID NO:74), osteoblast-specific factor 2 (SEQ ID NO:79), SP—H antigen (SEQ ID NO:84), thyroid-lupus autoantigen p70 (SEQ ID NO:91), the unnamed protein product having NCBI database Genbank gi 32097 (SEQ ID NO:96), the unnamed protein product having NCBI database Genbank gi 7022744 (SEQ ID NO:97), the unnamed protein product having NCBI database Genbank gi 21749696 (SEQ ID NO:98), a hypothetical protein (mago-nashi homolog) having NCBI database Genbank gi 15012020 (SEQ ID NO:107), a hypothetical protein (LS1-like) having NCBI database Genbank gi 15778927 (SEQ ID NO:108), a protein (human mRNA, complete cds gene product) having NCBI database Genbank gi 348239 (SEQ ID NO:109), FTSJ3 protein (SEQ ID NO:110), a predicted protein (similar to RIKEN cDNA 0610009D07) having NCBI having database Genbank gi 50745107(SEQ ID NO:111), chromosome segregation protein smc1 (SEQ ID NO:119), CPSF6 protein (SEQ ID NO:123), DNA-activated protein kinase (SEQ ID NO:167) and DNA-activated protein kinase catalytic subunit (SEQ ID NO:126), activating signal cointegrator 1 complex subunit 3-like 1 (SEQ ID NO:130), heterogeneous nuclear ribonucleoprotein M, (SEQ ID NO:133) a protein similar to small nuclear ribonucleoprotein D1 having NCBI database Genbank gi 34877889 (SEQ ID NO:142), histone deacetylase 2 (SEQ ID NO:144), histone H1b (SEQ ID NO:146), histone H2A.5 (SEQ ID NO:152), a protein similar to histone H3 having NCBI database Genbank gi 30156584 (SEQ ID NO:153), histone H3 (SEQ ID NO:158), histone H4 (SEQ ID NO:159), nucleolar protein NOP5/NOP58 (SEQ ID NO:107; SEQ ID NO:164), PTB-associated splicing factor (SEQ ID NO:168), and SmB/B′ autoimmune antigen (SEQ ID NO:180).

[0124] Furthermore, expression can be detected for one or more, two or more, three or more, four or more, five or more, six or more, seven of more, eight or more, nine or more, ten or more, twenty-five or more, one-half, one-third, or all of the following proteins, or nucleic acids encoding the protein(s): annexin V chain c (SEQ ID NO:7), epididymal protein (SEQ ID NO:17), glutaminase (SEQ ID NO:19), inter-alpha-trypsin inhibitor heavy chain 3 precursor (SEQ ID NO:30), alpha 2 macroglobulin (SEQ ID NO:29), membrane alanine aminopeptidase precursor (SEQ ID NO:31), type-2 phosphatidic acid phosphohydrolase (SEQ ID NO:33;), pregnancy zone protein precursor (SEQ ID NO:36), transglutaminase 2 isoform a/transglutaminase C (SEQ ID NO:42), and the unnamed protein product having a sequence with NCBI database Genbank gi 7023123 (SEQ ID NO:47).

[0125] Furthermore, expression can be detected for one or more, two or more, three or more, four or more, five or more, six or more, seven of more, eight or more, nine or more, ten or more, twenty-five or more, one-half, one-third, or all of the proteins, or encoding nucleic acids of: autoantigen p542 (SEQ ID NO:55), the 34 kD nucleolar sclerodema antigen (SEQ ID NO:71), lysosomal proteinase cathepsin b (SEQ ID NO:74), osteoblast-specific factor 2 (SEQ ID NO: 79), SP—H antigen (SEQ ID NO:84), thyroid-lupus autoantigen p70 (SEQ ID NO:9), the unnamed protein product having NCBI database Genbank gi 32097 (SEQ ID NO:96), the unnamed protein product having NCBI database Genbank gi 7022744 (SEQ ID NO:97), the unnamed protein product having NCBI database Genbank gi 21749696 (SEQ ID NO:98), a hypothetical protein (mago-nashi homolog) having NCBI database Genbank gi 15012020 (SEQ ID NO:107), a hypothetical protein (LS 1-like) having NCBI database Genbank gi 15778927 (SEQ ID NO:108), a protein (human mRNA, complete cds gene product) having NCBI database Genbank gi 348239 (SEQ ID NO:109), FTSJ3 protein (SEQ ID NO:110), a predicted protein (similar to RIKEN cDNA 0610009D07) having NCBI having database Genbank gi 50745107 (SEQ ID NO:111), chromosome segregation protein smc1 (SEQ ID NO:119; Genbank gi 2135244), CPSF6 protein (SEQ ID NO:123), DNA-activated protein kinase (SEQ ID NO:167) and DNA-activated protein kinase catalytic subunit (SEQ ID NO:126), activating signal cointegrator 1 complex subunit 3-like 1 (SEQ ID NO:130), heterogeneous nuclear ribonucleoprotein M (SEQ ID NO:133), a protein similar to small nuclear ribonucleoprotein D1 having NCBI database Genbank gi 34877889 (SEQ ID NO:142), histone deacetylase 2 (SEQ ID NO:144), histone H1b ((SEQ ID NO:146), histone H2A.5 (SEQ ID NO:152), a protein similar to histone H3 having NCBI database Genbank gi 30156584 (SEQ ID NO:153), histone H3 (SEQ ID NO:158), histone H4 (SEQ ID NO:159), nucleolar protein NOP5/NOP58 (SEQ ID NO:162), PTB-associated splicing factor (SEQ ID NO:168), or SmB/B′ autoimmune antigen (SEQ ID NO:180).

[0126] Certain aspects of the invention provide quantitative methods. For example, in certain aspects an expression level is determined of a protein of Table 1, or a nucleic acid encoding a protein of Table 1. In certain embodiments, an altered expression level in the biological sample compared to a normal sample is indicative of the presence of a breast pathology, such as breast cancer. Furthermore, expression levels can be correlated with a type of cancer, a stage of cancer, a prognosis, and/or response to one or more anti-cancer agents.

[0127] Typically, methods of this embodiment of the invention are performed by contacting the biological sample with a specific binding reagent that binds to the protein or the nucleic acid. Expression levels can then be quantitated by measuring the amount of specific binding reagent that binds to biomolecules in the sample. The specific binding reagent is typically an antibody or a nucleic acid. In certain examples, the antibody can bind a secondary modification of a protein of Table 1 or Table 2. It will be recognized that the detection method can be an immunoassay.

[0128] In another embodiment, provided herein is a kit that includes a specific binding reagent that binds to a protein of Table 1, or that binds to a nucleic acid encoding a protein of Table 1. Furthermore, the kits typically include a control that is a biological sample derived from a subject having a breast pathology. For example, the control can include cells obtained directly from a subject having a breast pathology, or tissue culture cells derived from cells of a subject having a breast pathology, such as breast cancer or a breast tumor. The specific binding reagent of the kit is typically an antibody or a nucleic acid. The specific binding reagent is typically present in one or more tubes that are associated together in packaging and shipped from a manufacturer to a customer.

[0129] The kit can include additional specific binding reagents. For example, specific binding reagents that bind to one or more, two or more, three or more, four or more, five or more, six or more, seven of more, eight or more, nine or more, ten or more, twenty-five or more, one-half, one-third, or all of the proteins, or encoding nucleic acids of Table 1.

[0130] In one embodiment, the kit includes specific binding reagents that bind to one or more, two or more, three or more, four or more, five or more, six or more, seven of more, eight or more, nine or more, ten or more, twenty-five or more, one-half, one-third, or all of the proteins, or encoding nucleic acids of Table 2.

[0131] In one embodiment, the kit includes specific binding reagents that bind to one or more, two or more, three or more, four or more, five or more, six or more, seven of more, eight or more, nine or more, ten or more, twenty-five or more, one-half, one-third, or all of the following proteins, or nucleic acids encoding these proteins: annexin V chain c (SEQ ID NO:7), epididymal protein (SEQ ID NO:17), glutaminase (SEQ ID NO:19), inter-alpha-trypsin inhibitor heavy chain 3 precursor (SEQ ID NO:25), alpha 2 macroglobulin (SEQ ID NO:29), membrane alanine aminopeptidase precursor (SEQ ID NO:30), type-2 phosphatidic acid phosphohydrolase (SEQ ID NO:33), pregnancy zone protein precursor (SEQ ID NO:36), transglutaminase 2 isoform a/transglutaminase C (SEQ ID NO:42), the unnamed protein product having a sequence with NCBI database Genbank gi 7023123 (SEQ ID NO:47), autoantigen p542 (SEQ ID NO:55), the 34 kD nucleolar sclerodema antigen (SEQ ID NO:71), lysosomal proteinase cathepsin b (SEQ ID NO:74), osteoblast-specific factor 2 (SEQ ID NO:79), SP—H antigen (SEQ ID NO:84), thyroid-lupus autoantigen p70 (SEQ ID NO:91), the unnamed protein product having NCBI database Genbank gi 32097 (SEQ ID NO:96), the unnamed protein product having NCBI database Genbank gi 7022744 (SEQ ID NO:97), the unnamed protein product having NCBI database Genbank gi 21749696 (SEQ ID NO:98), a hypothetical protein (mago-nashi homolog) having NCBI database Genbank gi 15012020 (SEQ ID NO:107), a hypothetical protein (LS1-like) having NCBI database Genbank gi 15778927 (SEQ ID NO:108), a protein (human mRNA, complete cds gene product) having NCBI database Genbank gi 348239 (SEQ ID NO:109), FTSJ3 protein (SEQ ID NO:110), a predicted protein (similar to RIKEN cDNA 0610009D07) having NCBI having database Genbank gi 50745107(SEQ ID NO:111), chromosome segregation protein smc1 (SEQ ID NO:119), CPSF6 protein (SEQ ID NO:123), DNA-activated protein kinase (SEQ ID NO:167) and DNA-activated protein kinase catalytic subunit (SEQ ID NO:126), activating signal cointegrator 1 complex subunit 3-like 1 (SEQ ID NO:130), heterogeneous nuclear ribonucleoprotein M, (SEQ ID NO:133) a protein similar to small nuclear ribonucleoprotein D1 having NCBI database Genbank gi 34877889 (SEQ ID NO:142), histone deacetylase 2 (SEQ ID NO:144), histone H1b (SEQ ID NO:146), histone H2A.5 (SEQ ID NO:152), a protein similar to histone H3 having NCBI database Genbank gi 30156584 (SEQ ID NO:153), histone H3 (SEQ ID NO:158), histone H4 (SEQ ID NO:159), nucleolar protein NOP5/NOP58 (SEQ ID NO:107; SEQ ID NO:164), PTB-associated splicing factor (SEQ ID NO:168), or SmB/B′ autoimmune antigen (SEQ ID NO:180).

[0132] In one embodiment, the kit includes specific binding reagents that bind to one or more, two or more, three or more, four or more, five or more, six or more, seven of more, eight or more, nine or more, ten or more, twenty-five or more, one-half, one-third, or all of the following proteins, or nucleic acids encoding these proteins: annexin V chain c (SEQ ID NO:7), epididymal protein (SEQ ID NO:17), glutaminase (SEQ ID NO:19), inter-alpha-trypsin inhibitor heavy chain 3 precursor (SEQ ID NO:30), alpha 2 macroglobulin (SEQ ID NO:29), membrane alanine aminopeptidase precursor (SEQ ID NO:31), type-2 phosphatidic acid phosphohydrolase (SEQ ID NO:33;), pregnancy zone protein precursor (SEQ ID NO:36), transglutaminase 2 isoform a/transglutaminase C (SEQ ID NO:42), or the unnamed protein product having a sequence with NCBI database Genbank gi 7023123 (SEQ ID NO:47).

[0133] In some preferred embodiments, one or more of the proteins listed in Table 1, or one or more nucleic acids encoding one or more of the proteins of Table 1, is detected in a biological sample of a patient known to have or suspected of having breast cancer, in which an altered expression level in the biological sample of the patient compared to the expression level in a normal sample is indicative of breast cancer. In some preferred embodiments, one or more of the proteins listed in Table 1, or one or more nucleic acids encoding one or more of the proteins of Table 1, is detected in a biological sample of a patient known to have or suspected of having breast cancer, in which an altered expression pattern biological sample of the patient compared to the expression pattern in a normal sample is indicative of breast cancer. The altered expression pattern can be, as nonlimiting examples, a different abundance, subcellular localization, aggregation status, activity, or post-translational modification. Detection of one or more biomarkers to detect breast cancer can be detection of two or more biomarkers detection of three or more biomarkers, or detection of four or more biomarkers of Table 1.

[0134] The present invention also includes methods of detecting one or more biomarkers expressed by a cancer cell, where the biomarker is a protein of Table 2, or a nucleic acid encoding at least a portion of a protein of Table 2, comprising detecting in a biological sample of a patient know to have or suspected of having cancer, an expression level or pattern of a protein of Table 2 or a nucleic acid encoding the protein of Table 2, in which an altered expression level or pattern in the biological sample compared to the expression level or pattern in a normal sample is indicative of a cancerous state. In some preferred embodiments, one or more of the proteins listed in Table 2 or one or more nucleic acids encoding one or more of the proteins of Table 2 is detected in a biological sample of a patient known to have or suspected of having breast cancer, wherein an altered expression level or pattern in the biological sample compared to the expression level in a normal sample is indicative of breast cancer. An altered expression pattern can be, as nonlimiting examples, a different abundance, subcellular localization, aggregation status, activity, or post-translational modification. Detection of one or more biomarkers to detect breast cancer can be detection of two or more biomarkers detection of three or more biomarkers, or detection of four or more biomarkers of Table 2.

[0135] Detecting a biomarker of Table 2 also includes detecting a protein encoded at the same genetic locus as those identified for the biomarkers of Table 2 (and as listed in Table 3), including proteins encoded by allelic variants of the genes identified as encoding the proteins listed in Table 2, or protein variants resulting from mutations or from alternative splicing, or proteins differing from the proteins listed in Table 2 in post-translational modifications, including but not limited to proteolytic processing.

[0136] In some preferred embodiments, cancer can be detected in a subject by detecting the expression level of one or more of the proteins of Table 2 that display a five-fold or greater difference in expression in breast cancer cells when compared with normal cells, such as annexin V chain c (SEQ ID NO:7; Genbank gi 809190), epididymal protein (SEQ ID NO:17; Genbank gi 23092553), glutaminase (SEQ ID NO:19; Genbank gi 12044394), inter-alpha-trypsin inhibitor heavy chain 3 precursor (SEQ ID NO:25; Genbank gi 3024064), alpha 2 macroglobulin (SEQ ID NO:29; Genbank gi 224053), membrane alanine aminopeptidase precursor (SEQ ID NO:30; Genbank gi 37590640; Genbank gi 4502095), type-2 phosphatidic acid phosphohydrolase (SEQ ID NO:33; Genbank gi 3015569), pregnancy zone protein precursor (SEQ ID NO:36; Genbank gi 131756), transglutaminase 2 isoform a/transglutaminase C (SEQ ID NO:42; Genbank gi 39777597), the unnamed protein product having a sequence with NCBI database Genbank gi 7023123 (SEQ ID NO:47), autoantigen p542 (SEQ ID NO:55; Genbank gi 3334899), the 34 kD nucleolar sclerodema antigen (SEQ ID NO:71; Genbank gi 3399667), lysosomal proteinase cathepsin b (SEQ ID NO:74; Genbank gi 181178), osteoblast-specific factor 2 (SEQ ID NO:79; Genbank gi 46576887), SP—H antigen (SEQ ID NO:84; Genbank gi 743447), thyroid-lupus autoantigen p70 (SEQ ID NO:91; Genbank gi 4503841), the unnamed protein product having NCBI database Genbank gi 32097 (SEQ ID NO:96), the unnamed protein product having NCBI database Genbank gi 7022744 (SEQ ID NO:97), the unnamed protein product having NCBI database Genbank gi 21749696 (SEQ ID NO:98), a hypothetical protein (mago-nashi homolog) having NCBI database Genbank gi 15012020 (SEQ ID NO:107), a hypothetical protein (LS1-like) having NCBI database Genbank gi 15778927 (SEQ ID NO:108), a protein (human mRNA, complete cds gene product) having NCBI database Genbank gi 348239 (SEQ ID NO:109), FTSJ3 protein (SEQ ID NO:110; Genbank gi 62914003), a predicted protein (similar to RIKEN cDNA 0610009D07) having NCBI having database Genbank gi 50745107(SEQ ID NO:111), chromosome segregation protein smc1 (Genbank gi 2135244), CPSF6 protein (Genbank gi 12653847), DNA-activated protein kinase (SEQ ID NO:119; Genbank gi 32140473) and DNA-activated protein kinase catalytic subunit (SEQ ID NO:126; Genbank gi 38258929), activating signal cointegrator 1 complex subunit 3-like 1 (SEQ ID NO:130; Genbank gi 40217847), heterogeneous nuclear ribonucleoprotein M, (SEQ ID NO:133; Genbank gi 55977747) a protein similar to small nuclear ribonucleoprotein D1 having NCBI database Genbank gi 34877889 (SEQ ID NO:142), histone deacetylase 2 (SEQ ID NO:144; Genbank gi 4557641), histone H1b (SEQ ID NO:146; Genbank gi 356168), histone H2A.5 (SEQ ID NO:152; Genbank gi 70686), a protein similar to histone H3 having NCBI database Genbank gi 30156584 (SEQ ID NO:153), histone H3 (SEQ ID NO:158; Genbank gi 386772), histone H4 (SEQ ID NO:159; Genbank gi 223582), nucleolar protein NOP5/NOP58 (SEQ ID NO:107; Genbank gi 17380155; SEQ ID NO:164; Genbank gi 21595782), PTB-associated splicing factor (SEQ ID NO:168; Genbank gi 38458), or SmB/B′ autoimmune antigen (SEQ ID NO:180; Genbank gi 36495). In some preferred embodiments, breast cancer can be detected in a subject by detecting the expression level of one or more of the proteins of Table 2 that display a five-fold or greater difference in expression in breast cancer cells when compared with normal cells.

[0137] In some preferred embodiments, one or more of the proteins listed in Table 2 that display a five-fold or greater difference in expression in breast cancer cells when compared with normal cells is detected as having an altered expression pattern in the biological sample of the patient compared to the expression level in a normal sample. The altered expression pattern can be, as nonlimiting examples, a different abundance, subcellular localization, aggregation status, activity, or post-translational modification. Detection of an altered expression pattern of one or more biomarkers of Table 2 that display a five-fold or greater difference in expression in breast cancer cells when compared with normal cells to detect cancer can be detection of two or more biomarkers, detection of three or more biomarkers, or detection of four or more biomarkers of Table 2 that display a five-fold or greater difference in expression.

[0138] Detection methods can include detecting expression of one or more proteins of the proteins of Table 2 that display an increase in expression in breast cancer cells with respect to normal cells, or an increase in expression in a subcellular compartment of breast cancer cells when compared with expression of the protein in the subcellular compartment of normal cells, or an increased abundance in a biological sample from a patient known to have or suspected of having cancer when compared with a sample from a patient that does not have cancer.

[0139] Detection methods can include detecting expression of one or more proteins of the proteins of Table 2 that display a five-fold or greater increase in expression in breast cancer cells when compared with normal cells, such as autoantigen p542 (SEQ ID NO:55), the 34 kD nucleolar sclerodema antigen (SEQ ID NO:71), lysosomal proteinase cathepsin b (SEQ ID NO:74), osteoblast-specific factor 2 (SEQ ID NO:79), SP—H antigen (SEQ ID NO:84), thyroid-lupus autoantigen p70 (SEQ ID NO:91), the unnamed protein product having NCBI database Genbank gi 32097 (SEQ ID NO:96), the unnamed protein product having NCBI database Genbank gi 7022744 (SEQ ID NO:97), the unnamed protein product having NCBI database Genbank gi 21749696 (SEQ ID NO:98), a hypothetical protein having NCBI database Genbank gi 15012020 (SEQ ID NO:107), a hypothetical protein having NCBI database Genbank gi 15778927 (SEQ ID NO:108), a protein having NCBI database Genbank gi 348239 (SEQ ID NO:109), FTSJ3 protein (SEQ ID NO:110), a protein NCBI database Genbank gi 50745107 (SEQ ID NO:111), chromosome segregation protein smc1 (SEQ ID NO:119), CPSF6 protein (SEQ ID NO:123), DNA-activated protein kinase (SEQ ID NO:167), U5 snRNP Sm D1(Sm-D autoantigen) (SEQ ID NO:142), histone deacetylase 2 (SEQ ID NO:144), histone H1b (SEQ ID NO:146), histone H2A.5 (SEQ ID NO:152), histone H3, a protein similar to histone H3 (SEQ ID NO:158), having NCBI database Genbank gi 30156584 (SEQ ID NO:153), histone H4 (SEQ ID NO: 159), nucleolar protein NOP5/NOP58 (SEQ ID NO:107), PTB-associated splicing factor (SEQ ID NO:168), or SmB/B′ autoimmune antigen (SEQ ID NO:168).

[0140] In some preferred embodiments, cancer can be detected in a subject by detecting the expression level or expression pattern of one or more of osteoblast specific factor 2 (SEQ ID NO:79; OSF-2, periostin), membrane alanine aminopeptidase precursor (SEQ ID NO:30; CD13), DNA-activated protein kinase (SEQ ID NO:119), or alpha 2 macroglobulin (SEQ ID NO:29) in a biological sample of a patient known to have or suspected of having cancer. In some preferred embodiments, breast cancer can be detected in a subject by detecting the expression level or pattern of one or more of osteoblast specific factor 2 (SEQ ID NO:79; OSF-2, periostin), or membrane alanine aminopeptidase precursor (SEQ ID NO:30; CD13). As described in Example 1, using the methods of the present invention, these proteins were found to have different abundances in membranes isolated from breast cancer cells when compared with normal cells.

[0141] A biological test sample, or a fraction or extract thereof, can be tested for the presence, absence, or amount of one or more biomarkers, where the presence, absence, or amount of one or more biomarkers detected is indicative of the presence of cancer in the patient. The detection of a biomarker can use a biomarker binding reagent that specifically binds a biomarker, such as, for example, an antibody, or can use a biomarker binding reagent such as a nucleic acid molecule or nucleic acid analog that can specifically bind at least a portion of a nucleic acid that encodes a biomarker. Detection of the biomarker is by detection of a label that can be directly or indirectly bound to or can directly or indirectly bind a biomarker binding reagent. A biomarker binding reagent can comprise or be directly or indirectly bound to detectable labels as they are known in the art, including but not limited to, radioactive, fluorescent, luminescent, or colorimetric labels. It is also possible to directly or indirectly bind a signal generating molecule or system to a specific binding reagent that binds a biomarker. For example, enzymes such as, but not limited to luciferase can be directly or indirectly bound to a specific binding reagent. A detection step can optionally include the addition of further reagents, such as substrates or cofactors, that are required for signal generation. Biomarker detection reagents can also be designed such that they can be specifically bound by a labeled reagent during the detection procedure, as in “sandwich” hybridization. Nonlimiting examples of detection methods useful in the present invention include immunocytochemistry, Western blotting, ELISA, immunoprecipitation, protein array detection, and other methods that use specific binding reagents such as but not limited to antibodies, and methods that employ nucleic acid hybridization (such as, but not limited to, Northern blots, array hybridization, FISH) and polymerase based methods such as, but not limited to, RT-PCR.

[0142] Disease state cells or biomarkers derived from disease state cells can be identified using immunocytochemistry using an antibody that specifically binds the biomarker. In other preferred embodiments, the biomarker can be used to detect cells by immunoprecipitation, ELISA, or Western blot of cells, sample fluid, cell supernatants, or lysates prepared from the tissue sample.

[0143] In some preferred embodiments, a biomarker can be detected by detecting the nucleic acid that encodes the biomarker. Nucleic acid hybridization can be used, for example, Northern blot, array hybridization, or FISH can detect and, preferably, quantify nucleic acids encoding one or more biomarkers of a disease state.

[0144] One or more concentration steps, separation steps, or purification steps can optionally be performed on a biological sample prior to biomarker detection using the sample. For example, cells can be pelleted from fluid samples, and the cells can be further analyzed, or, alternatively, the supernatant of a centrifuged fluid sample can be analyzed for the presence or amount of one or more biomarkers. Where immunocytochemistry or FISH is used to detect disease state biomarkers, the cells can be fixed and prepared for antibody or nucleic acid binding using methods known in the art.

[0145] Cells obtained from tissue samples or fluid samples can optionally be lysed, and optionally, further fractionated or processed for protein or nucleic acid detection, for example, using immunoprecipitation, ELISA, or Western blot, or using nucleic acid hybridization or incorporation of nucleotides into nucleic acid molecules that encode at least a portion of a biomarker.

[0146] Preferably but optionally, detection of one or more biomarkers is quantitative or at least somewhat quantitative. By “somewhat quantitative” is meant that absolute amounts of the biomarker may not be determined, but amounts of biomarkers are determined relative to a standard, such as, for example, a standard of signal intensity based on comparison with controls that can be, for example, samples of normal cells, tissues, or biological samples, or fractions thereof. For example, the intensity of sample cell staining using a biomarker detection reagent can be scaled to the intensity of staining of one or more control cells. In another example, the amount of detection reagent bound to components isolated from biological test samples can also be compared with the amount of detection reagent bound to control components to calibrate levels of one or more biomarkers in the test sample.

[0147] The detection of the presence, absence, amount, or expression pattern of one or more biomarkers in a tissue sample or sample of bodily fluid can be indicative of a disease state. The sample can be a tumor biopsy sample, a blood, plasma, or serum sample, lymphatic fluid, saliva, a lung aspirate, a nipple aspirate, breast duct lavage sample, a pelvic lavage sample, a swab or scraping, etc. taken from a patient suspected of having or known to have cancer. The sample, or a fraction or extract thereof, can be tested for the presence, absence, or amount of one or more biomarkers, where the presence, absence, or amount of one or more biomarkers detected is indicative of the presence of cancer in the patient.

[0148] The detection of the presence, absence, amount, or expression pattern of one or more biomarkers in a tissue sample or sample of bodily fluid can be indicative of a type or stage of a disease. The sample can be a tumor biopsy sample, a blood, plasma, or serum sample, lymphatic fluid, saliva, a lung aspirate, a nipple aspirate, breast duct lavage sample, a pelvic lavage sample, a swab or scraping, etc. taken from a patient suspected of having or known to have cancer. The sample, or a fraction or extract thereof, can be tested for the presence, absence, or amount of one or more biomarkers, where the presence, absence, or amount of one or more biomarkers has been correlated with a type or stage of cancer. In this case, the presence or amount of one or more biomarkers detected in a patient sample can determine the type or stage of cancer in the patient. For example, the detection of the expression level of one or more proteins of Table 1 in a biological sample of a patient with cancer can be indicative of a type or stage of cancer, such as, but not limited to breast cancer. The detection of the expression level of one or more proteins of Table 2 can be indicative of a type or stage of cancer, such as, but not limited to breast cancer.

[0149] The detection of the presence, absence, amount, or expression pattern of one or more biomarkers in a tissue sample or sample of bodily fluid can be indicative of a prognosis of a disease, or the response of a disease to particular therapies. The sample can be a tumor biopsy sample, a blood, plasma, or serum sample, lymphatic fluid, saliva, a lung aspirate, a nipple aspirate, breast duct lavage sample, a pelvic lavage sample, a swab or scraping, etc. taken from a patient suspected of having or known to have cancer. The sample, or a fraction or extract thereof, can be tested for the presence, absence, amount, or expression pattern of one or more biomarkers, where the presence, absence, or amount of one or more biomarkers has been correlated with a prognosis or a response to anti-cancer agents of the cancer. In this case, the presence or amount of one or more biomarkers detected in a patient sample can determine a prognosis or predict a drug response of the patient. For example, the detection of the expression pattern of one or more proteins of Table 1 in a biological sample of a patient known to have or suspected of having cancer can be indicative of a prognosis or of cancer, such as, but not limited to breast cancer. The detection of the expression pattern of one or more proteins of Table 2 can be indicative of a prognosis of cancer, such as, but not limited to breast cancer.

[0150] In other embodiments, detection of the expression pattern of one or more proteins of Table 1 in a biological sample of a patient with cancer, such as, but not limited to breast cancer, can be used to predict a response to anti-cancer agents. In further embodiments, the detection of the expression level of one or more proteins of Table 2 can be used to predict a response of a patient with cancer, such as but not limited to breast cancer, to one or more anti-cancer agents.

[0151] Detection of biomarker to detect cancer, as well as detection of biomarkers for typing and staging of cancer, as well as detection of biomarkers to indicate prognosis of a disease, or the response of a disease to particular therapies, can be by detection of one or more biomarkers underexpressed by cancer cells with respect to normal cells, by detection of one or more biomarkers overexpressed by cancer cells with respect to normal cells, or by a combination of the two. For example, detection of biomarkers can be detection of the proteins of Table 2 identified as upregulated proteins. In addition or in the alternative, detection of biomarkers can be detection of the proteins of Table 2 identified as downregulated proteins.

[0152] Detection of biomarkers can be, for example detection of the proteins of Table 2 identified as upregulated proteins that are overexpressed by 5 fold or greater in cancer cells, such as one or more of autoantigen p542 (SEQ ID NO:55; Genbank gi 3334899), the 34 kD nucleolar sclerodema antigen (SEQ ID NO:71; Genbank gi 3399667), lysosomal proteinase cathepsin b (SEQ ID NO:74; Genbank gi 181178), osteoblast-specific factor 2 (SEQ ID NO: 79; Genbank gi 46576887), SP—H antigen (SEQ ID NO:84; Genbank gi 743447), thyroid-lupus autoantigen p70 (SEQ ID NO:9; Genbank gi 4503841), the unnamed protein product having NCBI database Genbank gi 32097 (SEQ ID NO:96), the unnamed protein product having NCBI database Genbank gi 7022744 (SEQ ID NO:97), the unnamed protein product having NCBI database Genbank gi 21749696 (SEQ ID NO:98), a hypothetical protein (mago-nashi homolog) having NCBI database Genbank gi 15012020 (SEQ ID NO:107), a hypothetical protein (LS1-like) having NCBI database Genbank gi 15778927 (SEQ ID NO:108), a protein (human mRNA, complete cds gene product) having NCBI database Genbank gi 348239 (SEQ ID NO:109), FTSJ3 protein (SEQ ID NO:110; Genbank gi 62914003), a predicted protein (similar to RIKEN cDNA 0610009D07) having NCBI having database Genbank gi 50745107 (SEQ ID NO:111), chromosome segregation protein smc1 (SEQ ID NO:119; Genbank gi 2135244), CPSF6 protein (SEQ ID NO:123; Genbank gi 12653847), DNA-activated protein kinase (Genbank gi 32140473) and DNA-activated protein kinase catalytic subunit (SEQ ID NO:126; Genbank gi 38258929), activating signal cointegrator 1 complex subunit 3-like 1 (SEQ ID NO:130; Genbank gi 40217847), heterogeneous nuclear ribonucleoprotein M (SEQ ID NO:133; Genbank gi 55977747), a protein similar to small nuclear ribonucleoprotein D1 having NCBI database Genbank gi 34877889 (SEQ ID NO:142), histone deacetylase 2 (SEQ ID NO:144; Genbank gi 4557641), histone H1b ((SEQ ID NO:146; Genbank gi 356168), histone H2A.5 (SEQ ID NO:152; Genbank gi 70686), a protein similar to histone H3 having NCBI database Genbank gi 30156584 (SEQ ID NO:153), histone H3 (SEQ ID NO:158; Genbank gi 386772), histone H4 (SEQ ID NO:159; Genbank gi 223582), nucleolar protein NOP5/NOP58 (SEQ ID NO:162; Genbank gi 17380155; Genbank gi 21595782), PTB-associated splicing factor (SEQ ID NO:168; Genbank gi 38458), or SmB/B′ autoimmune antigen ((SEQ ID NO:180; Genbank gi 36495).

[0153] In addition or in the alternative, detection of biomarkers can be detection of the proteins of Table 2 identified as downregulated proteins that are underexpressed by 5 fold or greater in cancer cells, such as one or more of annexin V chain c (SEQ ID NO:7; Genbank gi 809190), epididymal protein (SEQ ID NO:17; Genbank gi 23092553), glutaminase (SEQ ID NO:19; Genbank gi 12044394), inter-alpha-trypsin inhibitor heavy chain 3 precursor (SEQ ID NO:30; Genbank gi 3024064), alpha 2 macroglobulin (SEQ ID NO:29; Genbank gi 224053), membrane alanine aminopeptidase precursor (SEQ ID NO:31; Genbank gi 37590640; Genbank gi 4502095), type-2 phosphatidic acid phosphohydrolase (SEQ ID NO:33; Genbank gi 3015569), pregnancy zone protein precursor (SEQ ID NO:36; Genbank gi 131756), transglutaminase 2 isoform a/transglutaminase C (SEQ ID NO:42; Genbank gi 39777597), or the unnamed protein product having a sequence with NCBI database Genbank gi 7023123 (SEQ ID NO:47).

III. Identification of Phosphoproteins

[0154] The present invention also includes the use of SILAC/MS to investigate proteins that undergo posttranslational modifications in cells, such as, for example, glycosylated proteins, acylated or isoprenylated proteins, oxidized proteins, and phosphorylated proteins. In many cases proteins having particular modifications can be isolated from a cell lysate using affinity reagents, such as but not limited to antibodies, that specifically recognize the modified forms of the proteins. Cells can optionally be fractionated prior to isolation of proteins. Alternatively or in addition, proteins can be separated from cell lysates or cell fractions using protein separation methods such chromatography, electrophoresis, differential precipitation, differential extraction, etc.

[0155] Of particular interest are phosphoproteins. Phosphorylation and dephosphorylation regulate many cellular events, such as cell cycle control, cell differentiation, transformation, apoptosis, signal transduction, etc. The present invention provides methods for studying phosphorylation cascades by identifying proteins whose phosphorylation state can be altered by a chemical, biological or even physical perturbation, such as, for example, drug treatment, toxic insult, physical exposure (such as radiation or UV treatment) or stimulation with growth or differentiation factors, etc.

[0156] One aspect of the present invention is a method for isolation one or more phosphoproteins or phosphopeptides that comprises applying a cell fraction comprising a phosphoprotein or phosphopeptide to a column, in which the column contains a matrix having a resin derivatized with iminodiacetic acid (IDA) that has been charged with Fe⁺³; and eluting one or more phosphoproteins or phosphopeptides from the column to obtain one or more isolated phosphoproteins or phosphopeptides. Preferably, a preparation of peptides (for example, protease digested proteins) is applied to the IDA column charged Fe⁺³ with for the isolation of phosphopeptides.

[0157] For example, the column can comprise a resin derivatized with iminodiacetic acid (IDA) that has a ligand density of from about 10 to about 60 micromoles per milliliter, preferably a ligand density of from about 20 to about 50 micromoles per milliliter, more preferably having a ligand density of from about 20 to about 50 micromoles per milliliter, and even more preferably of from about 30 to about 40 micromoles per milliliter. In some preferred embodiments, the resin has a ligand density of about 35 micromoles per milliliter. The resin particles preferably have a particle size of from about 30 microns to about 100 microns in diameter, more preferably from about 40 microns to about 90 microns in diameter, more preferably yet from about 50 microns to about 80 microns in diameter, and even more preferably of about 65 microns in diameter.

[0158] A preferred column for the isolation of phosphoproteins or phosphopeptides is a column that contains the resin made by Tosoh Biosciences, and designated Toyopearl AF-Chelate 650M resin (Tosoh Bioscience, Montgomery, Pa., 2005 part numbers 14475, 19800, and 14907) in which the resin is charged with a metal, such as but not limited to, Ga, Nb, Ti, Va, Ta, Sc, Al, Y, Zr, Ru, In, or Fe. Preferably, the column is charged with Fe³⁺.

[0159] In other embodiments, phosphoproteins or phosphopeptides can be isolated using Dyanbeads® Talon™ beads charged with Fe³⁺ (Invitrogen, Carlsbad, Calif.), a nitroloacetic acid (NTA) column charged with Fe³⁺, a Varian (Palo Alto, Calif.) Nexus column charged with Fe³⁺, or a column using Titansphere (TiO₂) available from GL Sciences Inc. (Japan).

[0160] A cell fraction can be a cell sample that has been lysed and preferably subjected to at least one separation procedure, including but not limited to: extraction with one or more solutions comprising at least one of a salt, a detergent or surfactant, an acid, or a base; centrifugation; solubilization; precipitation; affinity capture; dielectrophoresis; or chromatography. In some embodiments, phosphoproteins are first enriched by affinity capture using a specific binding reagent that binds one or more of phosphoserine, phosphothreonine, or phosphotyrosine. Proteins also can be separated from the cell fraction by methods such as electrophoresis or chromatography. In some preferred embodiments, proteins are digested with one or more proteases prior and the resulting peptide mixture is applied to the column.

[0161] In using a column that comprises IDA resin, such as Toyopearl AF-Chelate 650M, the matrix is preferably equilibrated in an acidic solution prior to applying a cell fraction to the column. The acidic solution preferably has a pH of from about 2 to about 4. A preferred acid is acetic acid at a concentration of from about 0.01% to about 1%, preferably at a concentration of from about 0.05% to about 0.5%, and more preferably at a concentration of about 0.1%.

[0162] After binding of phosphoproteins or phosphopeptides, the matrix can be washed with one or more wash solutions comprising at least one acid.

[0163] Elution of phosphoproteins or phosphopeptides can be in a solution that comprises one or more of piperidine, imidazole, a solution that contains o-phosphate, or a solution that has a basic pH, preferably a pH of between about 8 and about 11, or between about 8.5 and about 10.5, or a pH of about 9. Some preferred elution buffers comprise, for example, ammonium carbonate, ammonium hydroxide, diammonium citrate, ammonium acetate, ammonium dihydrogen phosphate, or ammonium bicarbonate. Another preferred solution for elution of phosphopeptides is a mixture of 2,5-dihydroxybenzoic acid and o-phosphoric acid.

[0164] One preferred protocol for the enrichment of phosphopeptides with immobilized metal affinity chromatography (IMAC) is the following: Toyopearl AF-Chelate-650M resin (2 to 4 μl suspension) is packed into an Eppendorf GELoading tip (1-10 μl; Eppendorf AG, Hanmburg, Germany) with a home-made frit (e.g. a tiny sliver of Porex polyethylene sheet; Porex products, X 4900), and subsequently loaded with 100 mM FeCl₃ in 2% acetic acid. The tip column is washed with 40% acetonile, and equilibrated with 0.1% acetic acid. The tryptic peptides extracted from gel pieces are dried in Speed Vac, resuspended in 50 μl of 10% acetonitrile in 0.1% acetic acid. The sample is pushed slowly through the tip column using an Eppendorf Repeater pipettor without allowing the column to dry. The tip column is washed sequentially with 30 μl of 0.1% acetic acid, 30 μl of 25% acetonitrile in 0.1% acetic acid, and then eluted with 6 to 10 μl of 100 mM ammonium bicarbonate (pH 9.0). The eluted phosphopeptides may be dried in a Speed Vac (or carefully lyopholyzed) and resuspended in 2 μl of 10% acetonitrile in 0.1% TFA or 0.1% formic acid for direct MS analysis, or abundant protein digests may be desalted with a C₁₈ ZipTip column and subsequently eluted with 75% acetonitrile in 0.1% TFA.

[0165] Phosphoproteins or phosphopeptides can be analyzed by mass spectrometry to obtain a mass spectrometry profile, for example, using LC-MS/MS, nanoelectospray MS/MS, or MALDI-TOF to identify one or more phosphoproteins or phosphopeptides.

[0166] SILAC/MS with Kinase Inhibitor and Phosphoprotein/Peptide Isolation

[0167] The invention also includes a method of identifying a protein whose phosphorylation in cells is inhibited by a kinase inhibitor, where the method includes: providing a first cell culture comprising cells and at least one isotope at a non-natural level in a from that is metabolically incorporated into proteins within cultured cells; providing a second cell culture comprising cells that do not comprise the at least one isotope at a non-natural level in the cell media; adding a kinase inhibitor to the first culture; allowing the cells in each of the cell cultures to divide;

[0168] combining at least a portion of the cells of the first with at least a portion of the cells of the second cell culture to form a mixed cell sample; separating one or more phosphoproteins from the mixed cell sample; performing mass spectrometry on the one or more proteins; identifying phosphoproteins in said one of the one or more proteins comprising the non-naturally occurring isotope with the abundance of the corresponding naturally-occurring isotope; and identifying at least one protein whose phosphorylation in cells is inhibited by a kinase inhibitor as a phosphoprotein that is present in greater abundance in the second cell culture than in the first cell culture.

[0169] The method can use media having one or more heavy isotope labels for one of the cultures being compared. For example, heavy Lysine (U-13C₆-Lysine) and heavy Arginine (U—¹³C₆-Arginine) are useful where proteins are digested with trypsin for MS analysis. Heavy tyrosine (U—¹³C₉-Tyrosine) is also an option for isotopic label, especially for analysis of phosphorylated peptides. Double labeled isotopes can also be used, for example heavy Arginine (U-15N, U-13C₆-Arginine) can be combined with heavy Lysine (U-13C₆-Lysine) in a media formulation.

[0170] The method can be used to identify one or more phosphoproteins whose phosphorylation is inhibited by a particular drug or compound. Such identified phosphoproteins can be candidate drug targets.

[0171] In yet another aspect, the invention provides a peptide derived from the Dok-2 protein that has a tyrosine residue that is phosphorylated in CML cells, where the peptide comprises the sequence GQEGEYAVPFDAVAR (SEQ ID NO:186). The tryptic peptide spans amino acids 294 through 318 of the human Dok-2 protein (SEQ ID NO:187; NCBI Genbank gi 41406050), and includes the tyrosine residue that is phosphorylated in CML cells is residue 299 of the protein sequence as listed in Genbank gi 41406050 in the NCBI database. The peptide so identified will hereinafter be referred to as “Dok-2/294-318”.

[0172] The invention also includes peptides and proteins having sequences homologous to at least a portion of the human Dok-2/294-318 sequence, and include the Tyr 299 residue. Such homologous sequences can be from any source, and can be designed and chemically synthesized or genetically engineered and expressed either as peptides or proteins. The sequences can be, for example, obtained by random, semi-random, or nonrandom mutation, or derived from proteins such as but in no way limited to sequences of Dok-2 proteins or Dok-2 homologs of other species. The peptides comprising sequences homologous to at least a portion of the human Dok-2/294-318 sequence can be phosphorylated to a detectable level by Bcr-Abl kinase or by other kinases that are directly or indirectly regulated by the Bcr-Abl kinase in cells, or by other kinases that are directly or indirectly inhibited by ST1571 in cellular assays.

[0173] The homologous sequences preferably are at least 50%, at least 60%, at least 70%, at least 75%, at least 80%, at least 85%, at least 90%, at least 95% or at least 99%. As used herein, “homologous” also includes 100% homologous, i.e., identical. The percent homology between two sequences can be determined using sequence analysis software. Such software matches similar sequences by assigning degrees of homology to various insertions, deletions, substitutions, and other modifications. Exemplary software include: The Sequence Analysis Software Package of the Genetics Computer Group, University of Wisconsin Biotechnology Center, Madison, Wis.; (Devereux et al., Nucleic Acids Res. 12:387, 1984); The algorithm of E. Myers and W. Miller (CABIOS, 4:11, 1989), which has been incorporated into the ALIGN program (version 2.0), using a PAM120 weight residue table, a gap length penalty of 12 and a gap penalty of 4; The NBLAST and XBLAST programs (version 2.0) of Altschul et al. (J. Mol. Biol. 215:403, 1990).

[0174] BLAST nucleotide searches can be performed with the NBLAST program, score=100, wordlength=12 to obtain nucleotide sequences homologous to the nucleic acid molecules of the invention. BLAST protein searches can be performed with the XBLAST program, score=50, wordlength=3 to obtain amino acid sequences homologous to the proteins of the invention. To obtain gapped alignments for comparison purposes, Gapped BLAST can be utilized as described in Altschul et al. (Nucleic Acids Res. 25:3389, 1997). When utilizing BLAST and gapped BLAST programs, the default parameters of the respective programs (e.g., XBLAST and NBLAST) can be used.

[0175] The invention also includes peptides and proteins comprising the human Dok-2 294-318 sequence, or sequences homologous to the human Dok-2 294-318 sequence, that can be phosphorylated by the Bcr-Abl kinase, or that can be phosphorylated by one or more other kinases that are inhibited by ST1571, or that can be phosphorylated by one or more other kinases that are directly or indirectly regulated by the Bcr-Abl kinase or by one or more kinases inhibited by ST1571.

[0176] The invention includes uses of the Dok-2 294-318 peptide, peptides homologous to the Dok-2 294-318 peptide, peptides and proteins comprising the Dok-2 294-318 peptide, and peptides and proteins comprising sequences homologous to the Dok-2 294-318 peptide (hereinafter referred to as Dok-2 294-318 peptide homologous peptides and proteins) in kinase and phosphatase assays.

[0177] Kinase assays can be conducted in any format, for example, the Dok-2 294-318 peptide homologous peptide or protein can be bound to a solid support, and detection of labeled phosphate bound to the solid support can indicate kinase activity, or the assay can be performed with the substrate Dok-2 294-318 peptide homologous peptide or protein in solution, where the Dok-2 294-318 peptide homologous peptide or protein is subsequently captured, precipitated, or separated, for example, on a column or gel, for detection of incorporated phosphorous.

[0178] Kinase assays (including assays for inhibitors of kinases) in which the Dok-2 294-318 peptide homologous peptides and proteins are used as substrates, and phosphorylation of the tyrosine residue corresponding to Tyr 299 of Dok-2 is detected can use detectable labels to monitor incorporation of phosphate into the peptide. Detection methods for kinase activity are known in the art, and include, but are not limited to, the use of labels, such as but not limited to radioactive labels (e.g., ³³P-ATP and ³⁵S-g-ATP), or probes, such as antibody probes that bind to phosphoamino acids. Antibody probes can be labeled, or detection can be by means of a secondary binding member that comprises a detectable label. The methods include providing a peptide or protein comprising a sequence homologous to at least a portion of the human Dok-2/294-318 sequence (GQEGEYAVPFDAVAR (SEQ ID NO:186)); contacting the peptide or protein with at least one cell extract or at least one kinase and at least one phosphorous-containing compound that can be used as a substrate by at least one kinase; detecting the incorporation of phosphorous into the peptide or protein.

[0179] In some embodiments, the peptide or protein can comprise the human Dok-2/294-318 sequence (GQEGEYAVPFDAVAR (SEQ ID NO:186)) and additional sequences unrelated to human Dok-2 sequences. In other embodiments, the assays can use the human Dok-2/294-318 peptide. In yet other embodiments, the assays can use a peptide or protein that comprises sequences homologous but not identical to the human Dok-2/294-318 sequence.

[0180] A cell fraction or a partially or substantially purified kinase can be used in the assays. The kinase can be any kinase, such as Bcr-Abl or another kinase inhibited by ST1571, or an unrelated tyrosine kinase. In most cases, ATP is provided as a source of phosphate, but other phosphorous-containing compounds that can be used by a kinase can be used. The phosphorous compound can be labeled for the detection of phosphorylation, or phosphorylation can be detected by the use of directly or indirectly labeled antibodies. For example, a secondary antibody can be used for sandwich hybridization.

[0181] Similarly, phosphatase assays, as well as assays for inhibitors of a phosphatase, can be conducted using Dok-2 294-318 peptide homologous peptides and proteins. For example, whereas incorporation into a protein of labeled phosphorus indicates kinase activity in one assay, another assay can be used to measure the reduction of labeled phosphorous on a solid support or captured substrate, or by the release of labeled phosphorus into the media, indicating phosphatase activity. Phosphatase assays can be performed by providing a peptide or protein comprising a sequence homologous to at least a portion of the human Dok-2/294-318 sequence (GQEGEYAVPFDAVAR); contacting the peptide or protein with at least one cell extract or at least one phosphatase; and detecting the release of phosphorous from the peptide or protein.

[0182] The following examples are intended to illustrate but not limit the invention.

### EXAMPLE 1

### Identification of Biomarkers for Breast Cancer

[0183] More than 50% of all major drug targets are membrane proteins and their role in cell-cell interaction and signal transduction is a vital concern. Based on labeling of normal and malignant breast cells with light or heavy isotopes of amino acids (SILAC), cell fractionation and ID gel separation of crude membrane proteins, followed by analysis of nanoelectrospray LC-MS/MS, we have quantified over 1600 proteins with approximate 1000 membrane-associated proteins and 250 unknown or hypothetical proteins. A number of proteins show increased expression levels in malignant breast cells, such as autoantigen p542, osteoblast-specific factor 2 (OSF-2), 4F2 heavy chain antigen, 34 KD nucleolar scleroderma antigen, and apoptosis inhibitor 5. The expression of other proteins, such as membrane alanine aminopeptidase (CD13), epididymal protein, macroglobulin alpha 2, and transglutaminase C, decreased in malignant breast cells, whereas the majority of proteins remained unchanged when compared to the corresponding non-malignant samples. Downregulation of CD13 and upregulation of OSF-2 was validated and confirmed with human tissues with breast carcinomas using immunohistochemistry. These results indicated that SILAC is a powerful technique for that can be extended to biomarker discovery.

[0184] Stable isotope labeling with amino acids in cell culture (SILAC) is a simple and accurate approach to quantify differential protein expression and dynamic regulation of posttranslational modification 1-10. Two populations of cells are grown in identical media except that one contains light amino acids and the other contains heavy amino acids. For example, ¹³C-labeled amino acids, such as [U—¹³C₆]Lys and [U—¹³C₆]Arg, are stable isotopes and can be handled like regular amino acids. During cell culturing, light or heavy amino acids are incorporated into proteins using the natural biosynthetic machinery of the cells. The labeling efficiency is almost 100%. Cells labeled with light or heavy amino acids are combined and treated as a single sample prior to any process or protein purification, eliminating quantification error due to unequal sample preparation and increasing reproducibility. When dual labels of heavy Lys and Arg are used, all tryptic peptides carry a mass tag with exception of C-terminal peptides, because trypsin cleaves polypeptides after Lys or Arg. Proteins and peptides labeled with light or heavy amino acids are chemically identical and co-elute in any liquid chromatography or electrophoretic separations. Nevertheless, the mass difference between the light and heavy peptides is distinguishable by mass spectrometry. Once isotopic peptide pairs have been correlated with the proteins from which they originate, their relative intensities can be used to quantify different expression of the parent protein between normal and disease state cells.

[0185] Membrane proteins play a pivotal role in regulating cell-cell interaction, recognition, migration, adhesion, and signal transduction. Currently more than 50% of all major drug targets for medicines are membrane proteins. In this report, we describe a SILAC approach in the quantification of differential membrane expression between normal and malignant breast cells from cell lines derived from a 74-year-old female with breast carcinoma.

Methods

[0186] NuPAGE gel, NuPAGE sample buffer, SimplyBlue SafeStain, Invitromass LMW calibrants, DMEM medium, Lys and Arg-deprived DMEM medium, FBS, dialyzed FBS, epidermal growth factor (EGF), SuperPicTure™ Polymer Detection Kit, and monoclonal anti-CD13 antibody were obtained from Invitrogen Life Sciences. [U—¹³C₆] L-Lysine and [U—¹³C₆] L-Arginine were purchased from Cambridge Isotope Laboratories. Normal L-Lysine, L-Arginine, Aprotinin, Leupeptin Hemisulfate, phenylmethanesulfonyl fluoride (PMSF), and insulin were purchased from Sigma. Rabbit anti-osteoblast specific factor 2 (OSF-2) antibody was ordered from Biovendor Laboratory Medicine, Inc. Trypsin was ordered from Promega. Benzonase was from Novagen. Normal (HTB-125) and malignant (HTB-126) breast cells, isolated from a 74 female with breast carcinoma, were purchased from ATCC.

[0187] Normal breast cells were maintained in DMEM medium containing 10% FBS and 30 ng/ml EGF and malignant cells were maintained in DMEM medium containing 10% FBS and 30 ng/ml insulin. For labeling of cells with light or heavy amino acids, aliquots of normal and malignant breast cells (10⁵ cells each) were harvested separately. Normal breast cells were resuspended in 3 ml of modified DMEM medium supplemented with 10% dialyzed FBS, 30 ng/ml EGF, light L-Lysine and light L-Arginine, whereas malignant cells were resuspended in 3 ml of modified DMEM medium supplemented with 10% dialyzed FBS, 30 ng/ml insulin, heavy [U—¹³C₆] L-Lysine and heavy [U—¹³C₆] L-Arginine. Initially normal and malignant cells were cultured in two separate 60 mm dishes. Every three to four days, either the media was replaced or the cells were split with the media being replenished with the corresponding light medium for normal cells or heavy labeling medium for malignant cells. Normal (˜10⁶ cells/100 mm dish) and malignant (˜10⁶ cells/100 mm dish) breast cells labeled with light or heavy amino acids are scraped off the dishes and mixed at 1:1 ratio. The cell mixture was lysed on ice for 30 min in 1.6 ml of hypotonic buffer (10 mM Tris-HCl (pH 7.4), 1 mM MgCl₂, 0.5 mM PMSF, 0.15 μM Aprotinin, 1 μM Leupeptin Hemisulfate, and 10 U/ml benzonase), followed by 30 strokes of a Dounce homogenizer. To the cell suspension, 0.4 ml of 5×sucrose (1.25 M sucrose stock in H₂O) was added and mixed five times, followed by centrifugation at 500×g for 10 min to remove nuclei. The supernatant was then centrifuged at 100,000×g for 1 h to obtain a crude membrane fraction. Membrane pellets were dissolved in 60 μl of 2×SDS sample buffer containing 50 mM DTT, heated at 95° C. for 5 min, and half of the sample was analyze by SDS-PAGE. The entire gel lane was cut into 30-45 fractions and the gel pieces were subjected to in-gel tryptic digest.

[0188] Tryptic peptides labeled with light or heavy amino acids were analyzed with nanoelectrospray LC-MS/MS on a Q-TOF API-US instrument (Waters Corporation). Atlantis™ dC18, 3 μm, 100 μm×100 mm column (Waters Corporation) was used for peptide separation. Alternatively, peptides were fractionated and spotted onto MALDI plates in a Nano LC-Probot system (LC Packings, Dionex), followed by the analysis with a 4700 proteomics analyzer (Applied Biosystems). For simple digests, a gradient of 5-45% (v/v) acetonitrile in 0.1% formic acid over 45 min, and then 45-95% acetonitrile in 0.1% formic acid over 5 min was used. For a complex sample, a gradient of 5-45% (v/v) acetonitrile over 90 min, and then 45-95% acetonitrile over 30 min was used. For a very complex sample, a gradient of 5-45% (v/v) acetonitrile over 120 min, and then 45-95% acetonitrile over 60 min was used. On the Q-TOF, four components were used to acquire MS/MS data with 1.4 s scan time. On the 4700 proteomics, peptides with mass over 1000 were chosen for MS/MS analysis.

[0189] Raw data files from Q-TOF instrument were processed with Mascot Distiller (Matrix Science, London) and then searched against NCBI database using Mascot search algorithm. A pair of light and heavy Lys and a pair of light and heavy Arg with delta mass of 6 Da were selected for variable modification. The mass tolerance of the precursor peptide ion was set at 200 ppm and mass tolerance for the MS/MS fragment ions was set at 0.5 Da. The Mascot output shows peptides labeled with light or heavy Lys and/or Arg. Quantification of peptide pairs was done and validated manually by examining both MS and MS/MS spectrums.

[0190] Raw data files from 4700 Proteomics were processed using GPS explorer (Applied Biosystems). Quantification software for ICAT works equally well on SILAC, except that the delta mass for SILAC is 6 Da for a pair of light and heavy Lys or Arg. At this moment, only one pair of light and heavy Lys or Arg can be selected for quantification. The Mascot search result can show identities of proteins as well as the relative ratio of isotopic peptide pairs.

[0191] Immunohistochemistry. Human tissue samples were embedded in paraffin. Slides with tissue sections were deparaffinized in xylene and dehydrated with alcohol. Antigens were retrieved with either 0.01 M citrate (pH 6.0) or 0.1% Trypsin-EDTA (pH 8.0) buffer. After incubating primary anti-OSF-2 antibody at a concentration of 0.125 μg/ml or anti-CD13 antibody at 1:50 dilution for 1 h, the HRP polymer was added and DBA chromogen was used for detection.

Results

[0192] Shown is FIG. 1 is the strategy used to identify and quantify differential expression of membrane proteins between normal epithelial and malignant breast cells isolated from a 74 year old female with breast carcinoma. Normal and malignant breast cells were grown in DMEM medium supplemented with either light Lysine and Arginine or heavy [U—¹³C₆]Lysine and [U—¹³C₆]Arginine, respectively. In a typical experiment, both Lys and Arg were uniformly labeled with heavy atoms of carbon C-13 making the amino acids 6 Da heavier than the light or naturally abundant carbon C-12 Lys and Arg. After propagating the cultures for at least six doubling times, aliquots of cells labeled with either light or heavy amino acids were lysed separately and analyzed by SDS-PAGE side by side. Protein bands with light or heavy labels were excised from the side by side gel lanes and subjected to in-gel tryptic digest. The tryptic peptide extracts with either light or heavy label were analyzed in parallel using MALDI-TOF. A complete shift of 6 Da for peptides containing heavy Lys and/or Arg was observed, indicating that 100% incorporation of heavy Lys and/or Arg into proteins was achieved.

[0193] In experiments to identify proteins differentially expressed between normal and malignant breast cells, normal and malignant cells were labeled with light or heavy amino acids as described above, scraped off the dishes, counted, and combined at a 1:1 ratio. The cell mixture (typically 3×10⁶ total cells) was lysed in 1.6 ml of hypotonic buffer (10 mM Tris-HCl, 1 mM MgCl2, Benzonase (10 U/ml), 0.5 mM PMSF, 0.15 uM Aprotinin, and 1 uM Leupeptin Hemisulfate) on ice for 30 min, followed by 30 strokes of a dounce homogenizer. 0.4 ml of 1.25 M sucrose was added to the cell suspension, which was dounced 5 more times. After removing nuclei by centrifugation at 500×g for 5 min, crude membrane pellets were obtained by ultracentrifugation for 100,000×g for 1 hour. Crude membrane pellets were directly dissolved in SDS sample buffer, followed by the analysis of SDS-PAGE. The entire gel lane was divided into approximately 40 sections, and then the proteins were in-gel digested with trypsin. The resulting peptide extract was analyzed by NESI LC-MS/MS on the Q-TOF instrument.Up to 100 proteins could be identified in a single LC-MS/MS run. Raw data was processed with Mascot Distiller. Protein identifications were performed with the Mascot search algorithm and quantification was achieved by manual analysis of corresponding peptide pairs in the MS spectrum.

[0194] As expected, isotopic peptide pairs always coeluted. For nanoelectrospray LC-MS/MS analysis on the Q-TOF instrument, the charge states of the peptides mostly appear at +2 and +3, although occasionally at +4. Therefore, in the MS spectrum, most of the peptide pairs are 3, 2, or 1.5 Da apart, respectively. Sometimes both light and heavy peptides were triggered for MS/MS fragmentation. In that case, some of their daughter ions, especially b fragment ions, were identical, but some y fragment ions were 6 Da apart as the daughter ions are singly-charged. Up to 25 isotopic peptide pairs derived from the same protein were recovered in a single LC-MS/MS run. Quantification was achieved through the average of multiple peptide pairs derived from the same protein. For example, we recovered nine peptides from vimentin, including peptides containing two lysines and/or arginines. The relative ratio of those isotopic peptide pairs was consistent and the standard deviation was ±10% (FIG. 2). The ratio of isotopic peptide pairs was consistent regardless of the number of lysine and/or arginine in the peptides or the charge state of the peptides. For example, the relative ratio of isotopic peptides of LQDEIQNMKEEMAR (SEQ ID NO:193) at charge state +2 was almost identical to that at charge state +3.

[0195] In cases where peptides or peptide pairs overlapped, the overlapping peptides were not used for quantification. Instead, quantitation for each individual protein that exhibited an overlapping peptide was achieved through examining other peptide pairs derived from the protein.

[0196] Unlike other chemical labeling methods, which handle two samples separately until the last step of analysis, SILAC mixes two populations of cells in the first step and then the cell mixture is treated as a single sample in all the subsequent steps. Therefore, SILAC is more accurate and reproducible. We performed three individual experiments, and found that as long as the cell number from normal and malignant cells was normalized, the results were highly reproducible. The same peptide of LLQDSVDFSLADAINTEFK (SEQ ID NO:191) derived from vimentin and peptide of VLQLINDNTATALSYGVFR (SEQ ID NO:196) derived from oxygen regulated protein precursor were recovered from three separate experiments. The relative ratio of heavy over light peptide was around 0.5 for vimentin, and was around 2.0 for oxygen regulated protein at all three separate experiments. The relative ratio of those isotopic peptide pairs for each individual protein remained remarkably constant (FIG. 3), with a standard deviation of ±10%.

[0197] Quantitation of peptides containing proline required special consideration. This is because amino acids provided in the culture medium are subject to cellular metabolism. arginine can be converted to proline via a glutamic acid γ-semialdehyde intermediate. The percentage of conversion is likely dependent on the cell type used as well as the amount of arginine and proline in the culture medium. The conversion of ¹³C arginine to ¹³C proline results in the presence of an additional satellite peak that shadows proline-containing peptides arising from cells grown in heavy ¹³C arginine media. Because proline retains five ¹³C atoms, these heavy isotopic forms of proline-containing peptides appear at 2.5 and 1.6 m/z units, respectively, above the double and triple charge states of the most abundant form of the Lys and/or Arg-labeled peptide. That is to say, although the incorporation of Arg is essentially complete, the conversion of arginine to proline splits that mass signal stemming from proline-containing peptides of the heavy-labeled cell state into two channels. Accordingly, when proline-containing peptides are used for quantification, a correction factor in peak intensity for total heavy labeled peptides would be the sum of peak intensities of these mass channels.

[0198] In FIG. 4, satellite peaks are observed for proline-containing peptides because Arg can be converted into proline (Pro) via α-ketoglutarate intermediate. When labeling cells with [U¹³C₆]Arg, a small satellite peak appears at [M+2.5] Da if the peptide is doubly charged and at [M+1.6] Da if triply-charged since proline has five carbons. However, prolines arising from [U¹³C₆, ¹⁵N₄]Arg by metabolic interconversion are 6 Da heavier due to the incorporation of a heavy nitrogen isotope. The correct amount of peptides with heavy labels would be the sum of peptides with heavy Lys and/or Arg and peptides with heavy Lys and/or Arg plus heavy Pro.

[0199] For example, as depicted in FIG. 4A, the peak intensity for heavy labeled peptide ETNLDSLPLVDTHSK (SEQ ID NO:197) would be the sum of peptides at m/z 837.93 and at m/z 840.45, although the peak intensity for light peptide remains at m/z 834.91. The correction ‘rule’ is independent of the charge state of the peptide as well as the number of lysines and/or arginines in the peptides. Because membrane proteins, especially matrix proteins, often contain proline, the proline effect should be taken into consideration when the relative ratio of an isotopic peptide pair is calculated.

[0200] Quantification becomes very complicated if peptides contain multiple prolines. For example, as depicted in FIG. 4E, a peptide of ISLPLPNFSSLNLR (SEQ ID NO:199) derived from vimentin was recovered. The intensity of heavy labeled peptides would be the sum of peptides at m/z 788.96, 791.47, and 793.96. Where four of more peptides that do not contain proline were recovered, the corresponding proline-containing the peptides were ignored. Because of the difficulty in quantitating proline-containing peptides, in general, we would not recommend that proline-containing peptides be used for calculating quantitative ratios when cells are labeled with heavy arginine.

[0201] Using SILAC approach, we have identified and quantified more than 1600 proteins, including approximate 1000 membrane or membrane-associated proteins, 250 unknown or hypothetical proteins, and 350 ribosomal, heated-shock, or histone proteins. The majority of proteins remained unchanged when compared to the corresponding non-malignant samples. Proteins with differential expression larger than 2-fold are displayed in Table 1. Proteins with differential expression larger than 3-fold are displayed in Table 2. Certain cell-adhesion or matrix proteins, such as epican, vimentin, integrin beta 1 isoform 1A precursor, annexin 1, A2, VI, and especially annexin V show decreased expression levels in malignant breast cells. Proteins regulating the function of ion channels and transporters, such as stomatin, plasma membrane calcium-transporting ATPase, and vesicle amine transport protein 1, showed decreased expression in cancer cells. Alpha 2 macroglobulin (A2M), a large glycosylated protease inhibitor, showed significant decrease in malignant breast cells. has been shown to be differentially expressed in normal prostatic stromal and epithelial cells, with increased expression in the stroma surrounding prostate cancer cells and undetectable expression in most tumor cells (Bogenrieder T et al. Prostate 33:225-32, 1997). A 10 fold downregulation of membrane alanine aminopeptidase precursor (CD13), a zinc-dependent metallopeptidase, was observed in breast cancer cells in this SILAC study. We further examined the expression of CD13 in normal and neoplastic human breast tissues using immunohistochemistry. The immunoreactivity patterns and statistics obtained with tissue sections from breast carcinomas suggest that expression of CD13 is significantly decreased in breast carcinomas, which is in agreement with the result obtained from mass spectrometry.

TABLE 1
Proteins Having a Difference in Abundance of 2-Fold or Greater
between Breast Cancer Cells and Normal Cells

| | | | SEQ |
|---|---|---|---|
| | | | ID |
| | NCBI GI number | Quantitation | NO |
| Downregulated proteins: | | | |
| Membrane or membrane-bound proteins | | | |
| ATPase | 291868 | 2 | 1 |
| Annexin I | 442631 | 2.4 | 2 |
| Annexin A2 | 50845387 | 2.7 | 3 |
| Annexin A2, isoform 2 | 18645167 | 2.2 | 4 |
| Human Annexin V With Proline Substitution By Thioproline | 3212603 | 2.8 | 5 |
| annexin VI isoform 1; | 4502109 | 2.2 | 6 |
| Chain C, Annexin V | 809190 | 5.5 | 7 |
| Similar to cytoskeleton-associated protein 4 [H. sapiens] | 19263767 | 2.1 | 8 |
| CD81 antigen | 12804239 | 3.7 | 9 |
| CD107a antigen | 126376 | 2.5 | 10 |
| CD109 | 19071209 | 2 | 11 |
| Delta-sarcoglycan (SG-delta) (35 kDa dystrophin-associated | 13431864 | 2.2 | 12 |
| glycoprotein) | | | |
| 1-8D | 23396 | 3.4 | 13 |
| Epican | 31191 | 2 | 14 |
| Erythrocyte band 7 integral membrane protein (Stomatin) | 114823 | 2.7 | 15 |
| endoglin precursor | 182091 | 2.1 | 16 |
| epididymal protein | 23092553 | 8.6 | 17 |
| growth regulated nuclear 68 protein | 226021 | 2 | 18 |
| glutaminase | 12044394 | 5.5 | 19 |
| guanine nucleotide-binding regulatory protein alpha- | 183182 | 2 | 20 |
| inhibitory subunit | | | |
| GTP-binding protein Rab3B | 106187 | 2.6 | 21 |
| hexokinase 1 isoform HKI | 4504391 | 3.5 | 22 |
| integrin beta 1 isoform 1A precursor | 19743813 | 2.3 | 23 |
| integrin alpha 2 precursor; Integrin, alpha-2 | 4504743 | 2.8 | 24 |
| inter-alpha-trypsin inhibitor heavy chain 3 precursor | 3024064 | 5.3 | 25 |
| Lysosome-associated membrane glycoprotein 1 precursor | 126376 | 2.5 | 26 |
| (LAMP-1) | | | |
| lysosome-associated membrane protein-3 variant | 21070332 | 2.9 | 27 |
| membrane-type matrix metalloproteinase | 793763 | 4.3 | 28 |
| macroglobulin alpha2 | 224053 | 7.5 | 29 |
| Membrane alanine aminopeptidase, precursor | 37590640 | 5 | 30 |
| membrane alanine aminopeptidase precursor | 4502095 | 10 | 31 |
| Major vault protein | 19913410 | 2 | 32 |
| type-2 phosphatidic acid phosphohydrolase | 3015569 | 5.1 | 33 |
| Plasma membrane calcium-transporting ATPase 4 (PMCA4) | 14286105 | 2.5 | 34 |
| plasminogen activator inhibitor type 1, member 2; | 24307907 | 3.8 | 35 |
| Pregnancy Zone Protein Precursor | 131756 | 6.4 | 36 |
| protein PP4-X | 189617 | 2.4 | 37 |
| Similar to cytoskeleton-associated protein 4 | 19263767 | 2.5 | 38 |
| Structure specific recognition protein 1 | 4507241 | 2 | 39 |
| syntenin | 2795863 | 2.2 | 40 |
| band 7.2b stomatin | 1103842 | 2.7 | 41 |
| transglutaminase 2 isoform a; transglutaminase C; | 39777597 | 6.5 | 42 |
| Vimentin | 418249 | 2.2 | 43 |
| Vesicle amine transport protein 1 | 18379349 | 2.1 | 44 |
| Unknown | | | |
| Unamed protein product | 28678 | 2.9 | 45 |
| unnamed protein product | 35218 | 2.1 | 46 |
| unnamed protein product | 7023123 | 7.5 | 47 |
| unknown | 2852648 | 2.7 | 48 |
| KIAA1253 protein | 6382026 | 2.9 | 49 |
| KIAA0908 protein | 4240305 | 2 | 50 |
| Others | | | |
| 5′-nucleotidase | 23897 | 4 | 51 |
| Upregulated proteins: | | | |
| Membrane or membrane-bound proteins | | | |
| alpha 1 type III collagen; | 4502951 | 4 | 52 |
| alpha 3 type VI collagen isoform 1 precursor | 4758028 | 2.2 | 53 |
| alpha 3 type VI collagen isoform 3 precursor; | 55743102 | 3.2 | 54 |
| autoantigen p542 | 3334899 | 7.5 | 55 |
| apoptosis inhibitor 5 | 30583025 | 4.9 | 56 |
| B23 nucleophosmin | 825671 | 4.5 | 57 |
| Chain H, Cathepsin D At Ph 7.5 | 5822091 | 2.3 | 58 |
| Chain A, Synthetic Ubiquitin With Fluoro-Leu At 50 And 67 | 31615803 | 3.7 | 59 |
| Collagen alpha 1(I) chain precursor | 115269 | 2.3 | 60 |
| Chain D, Tsg101(Uev) Domain In Complex With Ubiquitin | 48425523 | 3.6 | 61 |
| Carbamoylphosphate synthetase 2/aspartate | 41351087 | 3 | 62 |
| transcarbamylase/ | | | |
| cathepsin B | 3929733 | 3 | 63 |
| cathepsin Z precursor; CTSZ | 3294548 | 2.3 | 64 |
| coproporphyrinogen oxidase | 433888 | 3.4 | 65 |
| cysteine protease | 1890050 | 3.3 | 66 |
| Ephrin type-A receptor 2 precursor | 125333 | 2.3 | 67 |
| 4F2 heavy chain antigen | 177216 | 4 | 68 |
| fibroblast growth factor 2-interacting factor | 12656083 | 2.8 | 69 |
| farnesyl-diphosphate farnesyltransferase | 435677 | 3.3 | 70 |
| FBRL_HUMAN; 34 KD NUCLEOLAR SCLERODERMA | 3399667 | 8 | 71 |
| ANTIGEN | | | |
| putative G-binding protein | 3153873 | 3.1 | 72 |
| integrin beta 4 binding protein isoform a; | 4504771 | 3.4 | 73 |
| lysosomal proteinase cathepsin B | 181178 | 5 | 74 |
| matrin 3 | 6563246 | 4.5 | 75 |
| methylene tetrahydrofolate dehydrogenase 2 precursor | 5729935 | 4.3 | 76 |
| Nucleolin | 4885511 | 2.8 | 77 |
| Nucleolar protein NOP5/NOP58 | 21595782 | 7.5 | 78 |
| Osteoblast-specific factor 2 | 46576887 | 12 | 79 |
| Oxygen regulated protein (150 Kd) | 5453832 | 2.2 | 80 |
| Opa-interacting protein OIP2 | 2815604 | 4.5 | 81 |
| prostacyclin synthase | 3135115 | 2.5 | 82 |
| RAD50 homolog isofom, 1; | 19924129 | 3.3 | 83 |
| SP-H antigen | 743447 | 5 | 84 |
| SWI/SNF-related matrix-associated actin-dependent | 18606276 | 4.5 | 85 |
| regulator | | | |
| SLC3A2 protein | 12804283 | 3 | 86 |
| serine (or cysteine) proteinase inhibitor, clade H, member 1 | 32454741 | 2.4 | 87 |
| precursor | | | |
| scaffold attachment factor B | 1213639 | 3.2 | 88 |
| Solute carrier family 1 | 12652633 | 2 | 89 |
| Solute carrier family 7 (cationic amino acid transporter, y+ | 27503713 | 3.3 | 90 |
| system), member 5 | | | |
| thyroid-lupus autoantigen p70; | 4503841 | 5 | 91 |
| transferrin receptor | 4507457 | 2.2 | 92 |
| Transducin beta-like 3 | 23241743 | 2.6 | 93 |
| Voltage-dependent anion channel VDAC3 | 5733504 | 2 | 94 |
| Unknown | | | |
| unnamed protein product | 21750187 | 4 | 95 |
| unnamed protein product | 32097 | 5.8 | 96 |
| unnamed protein product | 7022744 | 6.1 | 97 |
| unnamed protein product | 21749696 | 7.5 | 98 |
| unnamed protein product | 10434070 | 4.4 | 99 |
| unnamed protein product | 34228 | 2 | 100 |
| unknown | 9789023 | 3.9 | 101 |
| hypothetical protein | 21740236 | 3 | 102 |
| hypothetical protein | 21739574 | 4.2 | 103 |
| hypothetical protein | 13276691 | 4 | 104 |
| hypothetical protein | 21739884 | 4.1 | 105 |
| nucleolar protein NOP5 (NOP58) | 7512749 | 7.5 | 106 |
| Hypothetical protein FLJ10292 | 17380155 | 6.3 | 107 |
| Hypothetical protein FLJ12525 | 15778927 | 6.4 | 108 |
| Human mRNA, complete cds | 348239 | 7.5 | 109 |
| FTSJ3 protein [Homo sapiens] | 62914003 | 5 | 110 |
| PREDICTED: similar to RIKEN cDNA 0610009D07 | 50745107 | 8 | 111 |
| Putatative 28 kDa protein | 14249858 | 3 | 112 |
| MGC2477 protein | 12655159 | 4.4 | 113 |
| Others | | | |
| ATP-dependant DNA helicase II | 17512093 | 3.2 | 114 |
| BRIX | 19070357 | 4.9 | 115 |
| cleavage and polyadenylation specific factor 6, 68 kD | 5901928 | 4.1 | 116 |
| subunit; | | | |
| cleavage and polyadenylation specific factor 5, 25 kD | 5901926 | 4.8 | 117 |
| subunit; | | | |
| chromatin-specific transcription elongation factor large | 6005757 | 5 | 118 |
| subunit | | | |
| chromosome segregation protein smc1 | 2135244 | 6.1 | 119 |
| cell cycle regulatory protein | 87057 | 3.7 | 120 |
| Chain B, Crystal Structure Of The Ku Heterodimer Bound To | 15825717 | 3.8 | 121 |
| Dna | | | |
| chaperonin | 41399285 | 2.2 | 122 |
| CPSF6 protein | 12653847 | 6.2 | 123 |
| dJ319D22.1 (CDC5-like protein) | 10183618 | 2.7 | 124 |
| DDX17 protein | 12653635 | 4.2 | 125 |
| DNA-activated protein kinase, catalytic subunit - human | 38258929 | 6.8 | 126 |
| DNA topoisomerase (ATP-hydrolyzing) | 105857 | 3.1 | 127 |
| DEAH (Asp-Glu-Ala-His) box polypeptide 9 isoform 1; | 4503297 | 4.6 | 128 |
| E2IG3 | 6457340 | 3.3 | 129 |
| U5 snRNP-specific protein, 200-KD | 40217847 | 6.2 | 130 |
| US snRNP-specific protein | 39963074 | 4.3 | 131 |
| hnRNP U protein | 32358 | 4.5 | 132 |
| hnRNA-binding protein M4 | 55977747 | 10 | 133 |
| heterogeneous nuclear ribonucleoprotein R | 5031755 | 4.9 | 134 |
| heterogeneous nuclear ribonucleoprotein L | 4557645 | 4.3 | 135 |
| Heterogeneous nuclear ribonucleoproteins A2/B1 (hnRNP | 133257 | 5.6 | 136 |
| A2/hnRNP B1) | | | |
| heterogeneous nuclear ribonucleoprotein C isoform b; | 4758544 | 7.3 | 137 |
| heterogeneous nuclear ribonucleoprotein G - human | 542850 | 4.6 | 138 |
| PREDICTED: similar to Small nuclear ribonucleoprotein Sm | 50756613 | 6.5 | 139 |
| D3 | | | |
| similar to Small nuclear ribonucleoprotein Sm D2 | 17471847 | 6 | 140 |
| small nuclear ribonucleoprotein Sm D1 | 32959908 | 6.5 | 141 |
| similar to Small nuclear ribonucleoprotein Sm D1 (Sm-D | 34877889 | 7 | 142 |
| autoantigen) | | | |
| FBRNP | 399758 | 5 | 143 |
| histone deacetylase 2 | 4557641 | 5.2 | 144 |
| huMCM5 | 1232079 | 3 | 145 |
| Histone H1b | 356168 | 6.5 | 146 |
| Histone macroH2A1.1 | 3493531 | 5.6 | 147 |
| Histone H2B.h (H2B/h) | 7387738 | 6.3 | 148 |
| HIST1H2BJ protein | 15680004 | 5 | 149 |
| H2A histone family, member Z; H2AZ histone | 4504255 | 6 | 150 |
| H2A histone family, member N | 4504249 | 6 | 151 |
| Histone H2A.5 | 70686 | 7.5 | 152 |
| similar to H3 histone, family 3B | 30156584 | 6.4 | 153 |
| H4 Histone family, member M | 4504321 | 8 | 154 |
| H4 Histone family, member L | 4504319 | 8 | 155 |
| H3 histone family, member T | 4504299 | 7 | 156 |
| H1 histone family, member 0 | 12652787 | 8 | 157 |
| histone H3 | 386772 | 8 | 158 |
| histone H4 | 223582 | 8 | 159 |
| heterochromatin-like protein 1 | 7416937 | 6.3 | 160 |
| inhibitor-2 of protein phosphatase-2A | 34604766 | 2.8 | 161 |
| UDP-glucose dehydrogenase | 18490087 | 3.3 | 162 |
| nucleolar protein 5A; | 32483374 | 3.6 | 163 |
| Nucleolar protein NOP5/NOP58 | 21595782 | 7.7 | 164 |
| nuclear RNA helicase | 1905998 | 3.8 | 165 |
| origin recognition complex subunit LATHEO | 5114107 | 3.2 | 166 |
| protein kinase, DNA-activated | 32140473 | 7 | 167 |
| PTB-associated splicing factor | 38458 | 8 | 168 |
| poly(ADP-ribose) polymerase | 190167 | 5 | 169 |
| proliferating cell nuclear protein P120 | 189422 | 2.5 | 170 |
| Proliferation associated cytokine-inducible protein CIP | 51094627 | 2.7 | 171 |
| Phosphoglycerate dehydrogenase | 15030035 | 3.3 | 172 |
| RNA helicase A - human | 1082769 | 3.7 | 173 |
| RNA helicase Gu - human (fragment) | 2135315 | 4 | 174 |
| RNA-binding region containing protein 2 isoform b; | 4757926 | 3.9 | 175 |
| replication licensing factor MCM5 - human | 2135871 | 3 | 176 |
| splicing factor 3b, subunit 1, 155 kDa; | 6912654 | 6 | 177 |
| splicing factor 3b, subunit 3, 130 kDa; | 40254849 | 5 | 178 |
| structure specific recognition protein 1; | 4507241 | 4.3 | 179 |
| SmB/B′ autoimmune antigene | 36495 | 9 | 180 |
| transketolase | 37267 | 3.1 | 181 |
| transcription factor NF-AT 90K chain | 1082856 | 3.2 | 182 |
| THOC4 protein | 30411083 | 5.4 | 183 |
| transformation upregulated nuclear protein | 460789 | 2.4 | 184 |
| ULIP | 1536909 | 2.4 | 185 |

[0202] Many upregulated proteins we identified have been reported as having increased expression in tumors. Expression of osteoblast specific factor 2 (OSF-2, periostin), a secreted matrix protein, increased 12 fold in breast carcinomas (Table 2). Our immunohistochemical studies on human breast tissue sections with normal or carcinomas suggest that OSF-2 is overexpressed in patients with breast carcinomas, in agreement with the result obtained from mass spectrometry. OSF-2 is overexpressed in the plasma membrane of breast cancer cells and, by a comparision between normal and tumor cells, OSF-2 appears to be translocated between the nuclear membrane and the plasma membrane in these two respective states.

TABLE 2
Proteins Having a Difference in Abundance of 3-Fold or Greater
between Breast Cancer Cells and Normal Cells

| | NCBI | SILAC | |
|---|---|---|---|
| | GI | quantifica- | SEQ ID |
| | number | tion | NO |
| Downregulated proteins: | | | |
| Membrane or membrane-bound | | | |
| proteins | | | |
| Chain C, Annexin V | 809190 | 5.5 | 7 |
| CD81 antigen | 12804239 | 3.7 | 9 |
| 1-8D | 23396 | 3.4 | 13 |
| epididymal protein | 23092553 | 8.6 | 17 |
| glutaminase | 12044394 | 5.5 | 19 |
| hexokinase 1 isoform HKI | 4504391 | 3.5 | 22 |
| inter-alpha-trypsin inhibitor heavy chain | 3024064 | 5.3 | 25 |
| 3 precursor | | | |
| lysosome-associated membrane | 21070332 | 3.0 | 27 |
| protein-3 variant | | | |
| membrane-type matrix | 793763 | 4.3 | 28 |
| metalloproteinase | | | |
| macroglobulin alpha2 | 224053 | 7.5 | 29 |
| Membrane alanine aminopeptidase, | 37590640 | 5.0 | 30 |
| precursor | | | |
| membrane alanine aminopeptidase | 4502095 | 10.0 | 31 |
| precursor | | | |
| type-2 phosphatidic acid | 3015569 | 5.1 | 33 |
| phosphohydrolase | | | |
| pregnancy zone protein precursor | 131756 | 6.4 | 36 |
| plasminogen activator inhibitor type 1, | 24307907 | 3.8 | |
| member 2 | | | |
| transglutaminase 2 isoform a; | 39777597 | 6.5 | 42 |
| transglutaminase C | | | |
| Unknown | | | |
| unnamed protein product | 7023123 | 7.5 | 47 |
| Others | | | |
| 5′-nucleotidase | 23897 | 4.0 | 51 |
| Upregulated proteins: | | | |
| Membrane or membrane-bound | | | |
| proteins | | | |
| alpha 1 type III collagen; | 4502951 | 4.0 | 52 |
| alpha 3 type VI collagen isoform 3 | 55743102 | 3.2 | 54 |
| precursor; | | | |
| autoantigen p542 | 3334899 | 7.5 | 55 |
| apoptosis inhibitor 5 | 30583025 | 4.9 | 56 |
| Chain A, Synthetic Ubiquitin With | 31615803 | 3.7 | 59 |
| Fluoro-Leu At 50 And 67 | | | |
| Chain D, Tsg101(Uev) Domain In | 48425523 | 3.6 | 61 |
| Complex With Ubiquitin | | | |
| Carbamoylphosphate synthetase | 41351087 | 3.0 | 62 |
| 2/aspartate transcarbamylase | | | |
| cathepsin B | 3929733 | 3.0 | 63 |
| coproporphyrinogen oxidase | 433888 | 3.4 | 65 |
| cysteine protease | 1890050 | 3.3 | 66 |
| 4F2 heavy chain antigen | 177216 | 4.0 | 68 |
| farnesyl-diphosphate | 435677 | 3.3 | 70 |
| farnesyltransferase | | | |
| FBRL_HUMAN; 34 KD Nucleolar | 3399667 | 8.0 | 71 |
| Scleroderma antigen | | | |
| putative G-binding protein | 3153873 | 3.1 | 72 |
| integrin beta 4 binding protein isoform a | 4504771 | 3.4 | 73 |
| lysosomal proteinase cathepsin B | 181178 | 5.0 | 74 |
| matrin 3 | 6563246 | 4.5 | 75 |
| methylene tetrahydrofolate | 5729935 | 4.3 | 76 |
| dehydrogenase 2 precursor | | | |
| Osteoblast-specific factor 2 | 46576887 | 12.0 | 79 |
| Opa-interacting protein OIP2 | 2815604 | 4.5 | 81 |
| RAD50 homolog isoform 1 | 19924129 | 3.3 | 83 |
| SP-H antigen | 743447 | 5.0 | 84 |
| SWI/SNF-related matrix-associated | 18606276 | 4.5 | 85 |
| actin-dependent regulator | | | |
| scaffold attachment factor B | 1213639 | 3.2 | 88 |
| Solute carrier family 7 (cationic amino | 27503713 | 3.3 | 90 |
| acid transporter) | | | |
| thyroid-lupus autoantigen p70 | 4503841 | 5.0 | 91 |
| Unknown | | | |
| unnamed protein product | 21750187 | 4.0 | 95 |
| unnamed protein product | 32097 | 5.8 | 96 |
| unnamed protein product | 7022744 | 6.1 | 97 |
| unnamed protein product | 21749696 | 7.5 | 98 |
| unnamed protein product | 10434070 | 4.4 | 99 |
| unknown | 9789023 | 3.9 | 101 |
| hypothetical protein | 21739574 | 4.2 | 103 |
| hypothetical protein | 13276691 | 4.0 | 104 |
| hypothetical protein | 21739884 | 4.1 | 105 |
| nucleolar protein NOP5 (NOP58) | 17380155 | 7.5 | 106 |
| mago-nashi homolog (FLJ10292) | 15012020 | 6.3 | 107 |
| LAS1-like protein (FLJ12525) | 15778927 | 6.4 | 108 |
| Human mRNA, complete cds | 348239 | 7.5 | 109 |
| FTSJ3 protein [Homo sapiens] | 62914003 | 5.0 | 110 |
| PREDICTED: similar to RIKEN cDNA | 50745107 | 8.0 | 111 |
| 0610009D07 | | | |
| MGC2477 protein | 12655159 | 4.4 | 113 |
| Others | | | |
| B23 nucleophosmin | 825671 | 4.5 | 57 |
| chromosome segregation protein smc1 | 2135244 | 6.1 | 119 |
| CPSF6 protein | 12653847 | 6.2 | 123 |
| DDX17 protein | 12653635 | 4.2 | 125 |
| DNA-activated protein kinase, catalytic | 38258929 | 6.8 | 126 |
| subunit - human activating signal | | | |
| cointegrator 1 complex subunit 3-like 1 | 40217847 | 6.2 | 130 |
| hnRNA-binding protein M4 | 55977747 | 10.0 | 133 |
| similar to snRNP Sm D1 (Sm-D | 34877889 | 7.0 | 142 |
| autoantigen) | | | |
| histone deacetylase 2 | 4557641 | 5.2 | 144 |
| Histone H1b | 356168 | 6.5 | 146 |
| Histone H2A.5 | 70686 | 7.5 | 152 |
| similar to H3 histone, family 3B | 30156584 | 6.4 | 153 |
| histone H3 | 386772 | 8.0 | 158 |
| histone H4 | 223582 | 8.0 | 159 |
| Nucleolar protein NOP5/NOP58 | 21595782 | 7.7 | 164 |
| protein kinase, DNA-activated | 32140473 | 7.0 | 167 |
| PTB-associated splicing factor | 38458 | 8.0 | 168 |
| SmB/B′ autoimmune antigen | 36495 | 9.0 | 180 |
| Downregulated proteins: | | | |
| Membrane or membrane-bound | | | |
| proteins | | | |
| Chain C, Annexin V | 809190 | 5.5 | 7 |
| CD81 antigen | 12804239 | 3.7 | 9 |
| 1-8D | 23396 | 3.4 | 13 |
| epididymal protein | 23092553 | 8.6 | 17 |
| glutaminase | 12044394 | 5.5 | 19 |
| hexokinase 1 isoform HKI | 4504391 | 3.5 | 22 |
| inter-alpha-trypsin inhibitor heavy chain | 3024064 | 5.3 | 25 |
| 3 precursor | | | |
| lysosome-associated membrane | 21070332 | 3.0 | 27 |
| protein-3 variant | | | |
| membrane-type matrix | 793763 | 4.3 | 28 |
| metalloproteinase | | | |
| macroglobulin alpha2 | 224053 | 7.5 | 29 |
| Membrane alanine aminopeptidase, | 37590640 | 5.0 | 30 |
| precursor | | | |
| membrane alanine aminopeptidase | 4502095 | 10.0 | 31 |
| precursor | | | |
| type-2 phosphatidic acid | 3015569 | 5.1 | 33 |
| phosphohydrolase | | | |
| pregnancy zone protein precursor | 131756 | 6.4 | 36 |
| plasminogen activator inhibitor type 1, | 24307907 | 3.8 | |
| member 2 | | | |
| transglutaminase 2 isoform a; | 39777597 | 6.5 | 42 |
| transglutaminase C | | | |
| Unknown | | | |
| unnamed protein product | 7023123 | 7.5 | 47 |
| Others | | | |
| 5′-nucleotidase | 23897 | 4.0 | 51 |
| Upregulated proteins: | | | |
| Membrane or membrane-bound | | | |
| proteins | | | |
| alpha 1 type III collagen; | 4502951 | 4.0 | 52 |
| alpha 3 type VI collagen isoform 3 | 55743102 | 3.2 | 54 |
| precursor; | | | |
| autoantigen p542 | 3334899 | 7.5 | 55 |
| apoptosis inhibitor 5 | 30583025 | 4.9 | 56 |
| Chain A, Synthetic Ubiquitin With | 31615803 | 3.7 | 59 |
| Fluoro-Leu At 50 And 67 | | | |
| Chain D, Tsg101(Uev) Domain In | 48425523 | 3.6 | 61 |
| Complex With Ubiquitin | | | |
| Carbamoylphosphate synthetase | 41351087 | 3.0 | 62 |
| 2/aspartate transcarbamylase | | | |
| cathepsin B | 3929733 | 3.0 | 63 |
| coproporphyrinogen oxidase | 433888 | 3.4 | 65 |
| cysteine protease | 1890050 | 3.3 | 66 |
| 4F2 heavy chain antigen | 177216 | 4.0 | 68 |
| farnesyl-diphosphate | 435677 | 3.3 | 70 |
| farnesyltransferase | | | |
| FBRL_HUMAN; 34 KD Nucleolar | 3399667 | 8.0 | 71 |
| Scleroderma antigen | | | |
| putative G-binding protein | 3153873 | 3.1 | 72 |
| integrin beta 4 binding protein isoform a | 4504771 | 3.4 | 73 |
| lysosomal proteinase cathepsin B | 181178 | 5.0 | 74 |
| matrin 3 | 6563246 | 4.5 | 75 |
| methylene tetrahydrofolate | 5729935 | 4.3 | 76 |
| dehydrogenase 2 precursor | | | |
| Osteoblast-specific factor 2 | 46576887 | 12.0 | 79 |
| Opa-interacting protein OIP2 | 2815604 | 4.5 | 81 |
| RAD50 homolog isoform 1 | 19924129 | 3.3 | 83 |
| SP-H antigen | 743447 | 5.0 | 84 |
| SWI/SNF-related matrix-associated | 18606276 | 4.5 | 85 |
| actin-dependent regulator | | | |
| scaffold attachment factor B | 1213639 | 3.2 | 88 |
| Solute carrier family 7 (cationic amino | 27503713 | 3.3 | 90 |
| acid transporter) | | | |
| thyroid-lupus autoantigen p70 | 4503841 | 5.0 | 91 |
| Unknown | | | |
| unnamed protein product | 21750187 | 4.0 | 95 |
| unnamed protein product | 32097 | 5.8 | 96 |
| unnamed protein product | 7022744 | 6.1 | 97 |
| unnamed protein product | 21749696 | 7.5 | 98 |
| unnamed protein product | 10434070 | 4.4 | 99 |
| unknown | 9789023 | 3.9 | 101 |
| hypothetical protein | 21739574 | 4.2 | 103 |
| hypothetical protein | 13276691 | 4.0 | 104 |
| hypothetical protein | 21739884 | 4.1 | 105 |
| nucleolar protein NOP5 (NOP58) | 17380155 | 7.5 | 106 |
| mago-nashi homolog (FLJ10292) | 15012020 | 6.3 | 107 |
| LAS1-like protein (FLJ12525) | 15778927 | 6.4 | 108 |
| Human mRNA, complete cds | 348239 | 7.5 | 109 |
| FTSJ3 protein [Homo sapiens] | 62914003 | 5.0 | 110 |
| PREDICTED: similar to RIKEN cDNA | 50745107 | 8.0 | 111 |
| 0610009D07 | | | |
| MGC2477 protein | 12655159 | 4.4 | 113 |
| Others | | | |
| B23 nucleophosmin | 825671 | 4.5 | 57 |
| chromosome segregation protein smc1 | 2135244 | 6.1 | 119 |
| CPSF6 protein | 12653847 | 6.2 | 123 |
| DDX17 protein | 12653635 | 4.2 | 125 |
| | 38258929 | 6.8 | 126 |
| | 40217847 | 6.2 | 130 |
| | 55977747 | 10.0 | 133 |
| | 34877889 | 7.0 | 142 |
| | 4557641 | 5.2 | 144 |
| | 356168 | 6.5 | 146 |
| | 70686 | 7.5 | 152 |
| | 30156584 | 6.4 | 153 |
| | 386772 | 8.0 | 158 |
| | 223582 | 8.0 | 159 |
| | 21595782 | 7.7 | 164 |
| | 32140473 | 7.0 | 167 |
| | 38458 | 8.0 | 168 |
| | 36495 | 9.0 | 180 |

[0203] Further analysis of upregulated non-membrane proteins reveals that many are involved in cell cycle control, activation of chromatin, regulation of transcription mRNA stability, and protein synthesis. For example, Cell cycle regulatory protein, DNA helicase, RNA helicase, DNA topoisomerase, DNA-activated protein kinase, histone deacetylase, cleavage and polyadenylation specific factor, splicing factor, heterogeneous nuclear ribonucleoprotein as well as histone proteins are significantly upregulated, which might be related to the rapid growth of cancer relative to normal cells.

[0204] FIG. 5 depicts a Western blot of three of the proteins identified in this study as having differential expression in normal breast and breast cancer cells. Osteoblast specific factor 2 was demonstrated to have twelve-fold greater abundance in cancer cells than in normal cells by cell culture heavy label incorporation/mass spectrometry, and the Western blot that juxtaposes the cancerous (C) and the normal (N) cell lysates is consistent with this result. (The protein is also detected in the media (S). DNA activated protein kinase also was found to be present in cancer cells at a higher level (6.8 fold) than in normal breast cells; this difference is also confirmed by Western blot. Alpha-2 macroglobulin, by contrast, was found to be of lower abundance in cancer cells when compared with normal cells by metabolic heavy isotope labeling in cell culture and mass spectrometry. This difference is again reflected in the Western blot of FIG. 5.

[0205] Using SILAC/MS, we have established a high-throughput characterization of membrane proteins. A set of proteins chosen for further analysis by cell staining and Western blot were all verified as being differentially expressed in breast cancer and normal breast cells. Our results indicate that SILAC is a powerful technique for global identification and quantification of protein expression, and holds great promise in biomarker and drug target discovery efforts.

### EXAMPLE 2

### Phosphopeptide Enrichment from Tryptic Digests Using Immobilized Metal Affinity Chromatography (imac) Resins

[0206] We have found that a mere two to four micro liters of Toyopearl AF-Chelate-650M resin material packed into an Eppendorf GeLoading tip, charged with 100 mM FeCl₃, and equilibrated with 0.1% acetic acid creates a microcolumn suitable for enrichment of as much as 30 pmole of phosphopeptides.

[0207] With tryptic digest of beta-casein as a test sample, we compared the quality of Toyopearl IDA resin charged with FeCl₃ with a commercially available phosphopeptide isolation kit from Pierce (cat#89853) that includes a gallium-chelated IDA-based resin. Phosphopeptides were isolated from a mixture of tryptic peptides by passing the solution slowly through the tip column. After washing with 0.1% acetic acid and then with 25% acetonitrile in 0.1% acetic acid, the phosphopeptides were eluted with 6 to 10 μl of ammonium bicarbonate (pH 9.0) The eluted phosphopeptides were dried in a Speed Vac and resuspended in 2 μl of 10% acetonitrile in 0.1% TFA or 0.1% formic acid for direct MS analysis, or desalted with a C₁₈ ziptip column and eluted with 75% acetonitrile in 0.1% TFA.

[0208] As depicted in FIG. 6, the phosphopeptide isolation kit from Pierce captured the monophosphorylated peptide of m/z 2062 with 5 μg of β-casein tryptic digest (FIG. 6A). However, the Toyopearl AF-Chelate 650M resin (Tosoh Bioscience, Montgomery, Pa., 2005 part numbers 14475, 19800, and 14907) was able to enrich both the monophosphopeptide of m/z 2062 and the tetraphosphopeptide of m/z 3122.3 with only 1 μg of β-casein tryptic digest (FIG. 6B).

[0209] This result indicates that the Toyopearl AF-Chelate 650M resin exhibits higher sensitivity for phosphopeptides than the phosphopeptide isolation kit than other available resins for phosphoproteins or phosphopeptides. To further test the ability of Toyopearl AF-Chelate 650M resin in the enrichment of phosphopeptides, Dok-2 protein band was excised from NuPAGE and in-gel digested with trypsin, the phosphopeptide was isolated from the tryptic digest as described above. As depicted in FIG. 7A, a peptide of m/z 1688 was clearly observed. Peptide sequence analysis indicated that this peptide corresponded to a phosphopeptide of Dok-2 with tyrosine phosphorylated at residue 299 (SEQ ID NO:186) (FIG. 7B). This result indicates that the Toyopearl AF-Chelate 650M resin works on samples of biological origin.

### EXAMPLE 3

[0210] SILAC is a also powerful tool for quantifying posttranslational modifications. We examined the change in the level of phosphophorylation of Dok-2 in response to treatment of STI571, an inhibitor of Bcr-Abl kinase, in human chronic myelogenous leukemia cells. As a control, aliquots of heavy tyrosine (U—¹³C₉) labeled cells (5×10⁸) were mixed equally with light tyrosine (¹²C) labeled cells (5×10⁸) before the drug treatment.

[0211] A first aliquot of heavy tyrosine labeled cells (5×10⁸) was preincubated with 1 μM of STI571 at 37° C. for 1 h and then mixed with an equal number of light (natural abundance) isotope tyrosine labeled cells. A second aliquot of heavy tyrosine labeled cells (5×10⁸) was preincubated with 1 μM of STI571 at 37° C. for 2 h and then also mixed with an equal number of light (natural abundance) isotope tyrosine labeled cells. In both cases, the cell mixtures (1×10⁹) were lysed with NP40 lysis buffer and incubated with 30 μg of the GST fusion of the SH₂ domain of SHIP1 conjugated to glutathione Sepharose 4B. Affinity captured proteins were then analyzed by SDS-PAGE on a NuPAGE® acrylamide gel (Invitrogen, Carlsbad, Calif.) and stained with SimplyBlue™ SafeStain™ protein gel stain (Invitrogen, Carlsbad, Calif.). The Dok-2 protein bands from each mixed cell sample were excised and digested with trypsin. The resulting tryptic peptides were analyzed by MALDI-TOF.

[0212] As depicted in FIG. 8A, when CML cells were incubated with STI571 for 1 h, the amount of phosphopeptide of Dok2 reduced to 75%, which was calculated from the peptide ratio of m/z 1688 to m/z 1697. When cells were incubated with STI571 for 2 h, the heavy labeled phosphopeptide of 1697 was inhibited more than 90%, as quantitated from the ratio of isotopic peptide pairs (FIG. 8B). This result indicates that quantitation that the phosphoproteomics methods presented herein can be targeted to specific transduction pathways, by studying phosphorylation cascades in Dok2/p210bcr/abl-expressing hematopoietic cells.

[0213] Based on metabolic labeling of proteins with light and heavy tyrosine, and using affinity capture reagents for SHIP2 and Dok2, we were able to determine the change in phosphorylation of Bcr-Abl kinase, as well as its downstream substrates SHIP2 and Dok2, in response to STI571 treatment in human chronic myelogenous leukemia (CML) cells. In this study, we have identified two phosphopeptides from Bcr-Abl kinase, one from SHIP2 (FIG. 9A), and one from Dok-2 (FIG. 9B). Dok-2 is a substrate of Bcr-Abl kinase, which displays increased tyrosine phosphorylation levels in primary CML progenitor cells in human patients. We identified a novel phosphorylation site in Dok-2 (Tryosine 299 in tryptic peptide GQEGEYAVPFDAVAR (SEQ ID NO:186)) as shown in FIG. 9B, and have shown that the phosphorylation level of this site is decreased 75% upon 1 h treatment with STI571 and was inhibited more than 90% upon treatment with STI571 for 2 h. Table 3 shows phosphopeptides found in increased abundance in non-treated CML cells as compared with ST1571-treated CML cells.

TABLE 3

Phosphopeptides in CML Cells

| | | |
|---|---|---|
| | Genbank | |
| Name of Protein | gi | Peptide Sequence |

| | | |
|---|---|---|
| BCR-ABL Kinase | 514267 | LMTGDTpyTAHAGAK |
| | | (SEQ ID NO: 200) |
| | 487345 | NSLETLLpYKPVDR |
| | | (SEQ ID NO: 201) |
| Caspase | 17977658 | DENYMIAMR |
| recruitment domain | | (SEQ ID NO: 202) |
| protein 10 | | |
| Dok-2 protein | 41406050 | GQEGEpYAVPFDAVAR |
| | | (SEQ ID NO: 186) |
| | | LYLLAAPAAER |
| | | (SEQ ID NO: 203) |
| FERM and PDZ | 662416 | DLACLIAGYYR |
| domain containing | | (SEQ ID NO: 204) |
| 1 | | |
| GRB-2associated | 6912460 | MSGDPDLEYYK |
| binding 2 isoform b | | (SEQ ID NO: 205) |
| SHC | 284403 | ESTTTPGQYVLTGLQSGQPK |
| | | (SEQ ID NO: 206) |
| SHIP2 | 4755142 | TLSEVDpYAPAGPAR |
| | | (SEQ ID NO: 207) |
| SHIP1 | 1888525 | AIQDYLSTQLAQDSEFVK |
| | | (SEQ ID NO: 208) |

[0214] This approach is applicable to the study of regulation of phosphorylation in response to stimuli or drug treatment in cell culture in general.

[0215] Although the invention has been described with reference to the above examples, it will be understood that modifications and variations are encompassed within the spirit and scope of the invention.

[0216] All headings are for the convenience of the reader, and are not intended to limit the scope of the invention.

[0217] All references cited herein, including patents, patent applications, and publications, are incorporated by reference in their entireties.

The application's sequence listing, which the Patent Office published only in electronic form, follows.

SEQUENCE LISTING (208 sequences)

SEQ ID NO: 1 - protein, 617 aa, Homo sapiens
MDFSKLPKILDEDKESTFGYVHGVSGPVVTACDMAGAAMYELVRVGHSELVGEIIRLEGDMATIQVYEETCGVSVGDPVLRTGKPLSVDVGPGIMGAIFDGIQRPLSDISSQTQSIYIPRGVNVSALSRDIKWDFTPCKNLRVGSHITGGDIYGIVSENSLIKHKIMLPPRNRGTVTYIAPPGNYDTSDVVLELEFEGVKEKFTMVQVWPARQVRPVTEKLPANHPLLTGQRVLDALFPCVQGGTTAIPGAFGCGKTVISQSLSKYSNSDVIIYVGCGERGNEMSEVLRDFPELTMEVDGKVESIMKRTALVANTSNMPVAAREASIYTGITLSEYFRDMGYHVSMMADSTSRWAEALREISGRLAEMPADSGYPAYLGARLASFYERAGRVKCLGNPEREGSVSIVGAVSPPGGDFSDPVTSATLGIVQVFWGLDKKLAQRKHFPSVNWLISYSKYMRALDEYYDKHFTEFVPLRTKAKEILQEEEDLAEIVQLVGKASLAETDKITLEVAKLIKDDFLQQNGYTPYDRFCPFYKTVGMLSNMIAFYDMARRAVETTAQSDNKITWSIIREHMGDILYKLSSMKFKDPLKDGEAKIKSDYAQLLEDMQNAFRSLED

SEQ ID NO: 2 - protein, 314 aa, Homo sapiens [sequence omitted]

SEQ ID NO: 3 - protein, 357 aa, Homo sapiens
MGRQLAGCGDAGKKASFKMSTVHEILCKLSLEGDHSTPPSAYGSVKAYTNFDAERDALNIETAIKTKGVDEVTIVNILTNRSNAQRQDIAFAYQRRTKKELASALKSALSGHLETVILGLLKTPAQYDASELKASMKGLGTDEDSLIEIICSRTNQELQEINRVYKEMYKTDLEKDIISDTSGDFRKLMVALAKGRRAEDGSVIDYELIDQDARDLYDAGVKRKGTDVPKWISIMTERSVPHLQKVFDRYKSYSPYDMLESIRKEVKGDLENAFLNLVQCIQNKPLYFADRLYDSMKGKGTRDKVLIRIMVSRSEVDMLKIRSEFKRKYGKSLYYYIQQDTKGDYQKALLYLCGGDD

SEQ ID NO: 4 - protein, 339 aa, Homo sapiens [sequence omitted]

SEQ ID NO: 5 - protein, 320 aa, Homo sapiens
  MOD_RES (13): variable amino acid
  MOD_RES (87): variable amino acid
  MOD_RES (119): variable amino acid
  MOD_RES (163): variable amino acid
  MOD_RES (248): variable amino acid
MAQVLRGTVTDFXGFDERADAETLRKAMKGLGTDEESILTLLTSRSNAQRQEISAAFKTLFGRDLLDDLKSELTGKFEKLIVALMKXSRLYDAYELKHALKGAGTNEKVLTEIIASRTXEELRAIKQVYEEEYGSSLEDDVVGDTSGYYQRMLVVLLQANRDXDAGIDEAQVEQDAQALFQAGELKWGTDEEKFITIFGTRSVSHLRKVFDKYMTISGFQIEETIDRETSGNLEQLLLAVVKSIRSIXAYLAETLYYAMKGAGTDDHTLIRVMVSRSEIDLFNIRKEFRKNFATSLYSMIKGDTSGDYKKALLLLCGEDD

SEQ ID NO: 6 - protein, 673 aa, Homo sapiens
MAKPAQGAKYRGSIHDFPGFDPNQDAEALYTAMKGFGSDKEAILDIITSRSNRQRQEVCQSYKSLYGKDLIADLKYELTGKFERLIVGLMRPPAYCDAKEIKDAISGIGTDEKCLIEILASRTNEQMHQLVAAYKDAYERDLEADIIGDTSGHFQKMLVVLLQGTREEDDVVSEDLVQQDVQDLYEAGELKWGTDEAQFIYILGNRSKQHLRLVFDEYLKTTGKPMKASIRGELSGDFEKLMLAVVKCIRSTPEYFAERLFKAMKGLGTRDNTLIRIMVSRSELDMLDIREIFRTKYEKSLYSMIKNDTSGEYKKTLLKLSGGDDDAAGQFFPEAAQVAYQMWELSAVARVELKGTVRPANDFNPDADAKALRKAMKGLGTDEDTIIDIITHRSNVQRQQIRQTFKSHFGRDLMTDLKSEISGDLARLILGLMMPPAHYDAKQLKKAMEGAGTDEKALIEILATRTNAEIRAINEAYKEDYHKSLEDALSSDTSGHFRRILISLATGHREEGGENLDQAREDAQVAAEILEIADTPSGDKTSLETRFMTILCTRTYPHLRRVFQEFIKMTNYDVEHTIKKEMSGDVRDAFVAIVQSVKNKPLFFADKLYKSMKGAGTDEKTLTRIMVSRSEIDLLNIRREFIEKYDKSLHQAIEGDTSGDFLKALLALCGGED

SEQ ID NO: 7 - protein, 319 aa, Homo sapiens
AQVLRGTVTDFPGFDERADAETLRKAMKGLGTDEESILTLLTSRSNAQRQEISAAFKTLFGRDLLDDLKSELTGKFEKLIVALMKPSRLYDAYELKHALKGAGTNEKVLTEIIASRTPEELRAIKQVYEEEYGSSLEDDVVGDTSGYYQRMLVVLLQANRDPDAGIDEAQVEQDAQALFQAGELKWGTDEEKFITIFGTRSVSHLRKVFDKYMTISGFQIEETIDRETSGNLEQLLLAVVKSIRSIPAYLAETLYYAMKGAGTDDHTLIRVMVSRSEIDLFNIRKEFRKNFATSLYSMIKGDTSGDYKKALLLLCGEDD

SEQ ID NO: 8 - protein, 560 aa, Homo sapiens
AAGPACVASSPGSARSASLTGRRGRRRGGGGRPPPPASSARPPSPAARPLAASSSASCSRRLGRALNFLFYLALVAAAAFSGWCVHHVLEEVQQVRRSHQDFSRQREELGQGLQGVEQKVQSLQATFGTFESILRSSQHKQDLTEKAVKQGESEVSRISEVLQKLQNEILKDLSDGIHVVKDARERDFTSLENTVEERLTELTKSINDNIAIFTEVQKRSQKEINDMKAKVASLEESEGNKQDLKALKEAVKEIQTSAKSREWDMEALRSTLQTMESDIYTEVRELVSLKQEQQAFKEAADTERLALQALTEKLLRSEESVSRLPEEIRRLEEELRQLKSDSHGPKEDGGFRHSEAFEALQQKSQGLDSRLQHVEDGVLSMQVASARQTESLESLLSKSQEHEQRLAALQGRLEGLGSSEADQDGLASTVRSLGETQLVLYGDVEELKRSVGELPSTVESLQKVQEQVHTLLSQDQAQAARLPPQDFLDRLSSLDNLKASVSQVEADLKMLRTAVDSLVAYSVKIETNENNLESAKGLLDDLRNDLDRLFVKVEKIHEKV

SEQ ID NO: 9 - protein, 236 aa, Homo sapiens
MGVEGCTKCIKYLLFVFNFVFWLAGGVILGVALWLRHDPQTTNLLYLELGDKPAPNTFYVGIYILIAVGAVMMFVGFLGCYGAIQESQCLLGTFFTCLVILFACEVAAGIWGFVNKDQIAKDVKQFYDQALQQAVVDDDANNAKAVVKTFHETLDCCGSSTLTALTTSVLKNNLCPSGSNIISNLFKEDCHQKIDDLFSGKLYLIGIAAIVVAVIMIFEMILSMVLCCGIRNSSVY

SEQ ID NO: 10 - protein, 416 aa, Homo sapiens
MAPRSARRPLLLLLPVAAARPHALSSAAMFMVKNGNGTACIMANFSAAFSVNYDTKSGPKNMTFDLPSDATVVLNRSSCGKENTSDPSLVIAFGRGHTLTLNFTRNATRYSVQLMSFVYNLSDTHLFPNASSKEIKTVESITDIRADIDKKYRCVSGTQVHMNNVTVTLHDATIQAYLSNSSFSRGETRCEQDRPSPTTAPPAPPSPSPSPVPKSPSVDKYNVSGTNGTCLLASMGLQLNLTYERKDNTTVTRLLNINPNKTSASGSCGAHLVTLELHSEGTTVLLFQFGMNASSSRFFLQGIQLNTILPDARDPAFKAANGSLRALQATVGNSYKCNAEEHVRVTKAFSVNIFKVWVQAFKVEGGQFGSVEECLLDENSTLIPIAVGGALAGLVLIVLIAYLVGRKRSHAGYQTI

SEQ ID NO: 11 - protein, 1445 aa, Homo sapiens
MQGPPLLTAAHLLCVCTAALAVAPGPRFLVTAPGIIRPGGNVTIGVELLEHCPSQVTVKAELLKTASNLTVSVLEAEGVFEKGSFKTLTLPSLPLNSADEIYELRVTGRTQDEILFSNSTRLSFETKRISVFIQTDKALYKPKQEVKFRIVTLFSDFKPYKTSLNILIKDPKSNLIQQWLSQQSDLGVISKTFQLSSHPILGDWSIQVQVNDQTYYQSFQVSEYVLPKFEVTLQTPLYCSMNSKHLNGTITAKYTYGKPVKGDVTLTFLPLSFWGKKKNITKTFKINGSANFSFNDEEMKNVMDSSNGLSEYLDLSSPGPVEILTTVTESVTGISRNVSTNVFFKQHDYIIEFFDYTTVLKPSLNFTATVKVTRADGNQLTLEERRNNVVITVTQRNYTEYWSGSNSGNQKMEAVQKINYTVPQSGTFKIEFPILEDSSELQLKAYFLGSKSSMAVHSLFKSPSKTYIQLKTRDENIKVGSPFELVVSGNKRLKELSYMVVSRGQLVAVGKQNSTMFSLTPENSWTPKACVIVYYIEDDGEIISDVLKIPVQLVFKNKIKLYWSKVKAEPSEKVSLRISVTQPDSIVGIVAVDKSVNLMNASNDITMENVVHELELYNTGYYLGMFMNSFAVFQECGLWVLTDANLTKDYIDGVYDNAEYAERFMEENEGHIVDIHDFSLGSSPHVRKHFPETWIWLDTNMGYRIYQEFEVTVPDSITSWVATGFVISEDLGLGLTTTPVELQAFQPFFIFLNLPYSVIRGEEFALEITIFNYLKDATEVKVIIEKSDKFDILMTSNEINATGHQQTLLVPSEDGATVLFPIRPTHLGEIPITVTALSPTASDAVTQMILVKAEGIEKSYSQSILLDLTDNRLQSTLKTLSFSFPPNTVTGSERVQITAIGDVLGPSINGLASLIRMPYGCGEQNMINFAPNIYILDYLTKKKQLTDNLKEKALSFMRQGYQRELLYQREDGSFSAFGNYDPSGSTWLSAFVLRCFLEADPYIDIDQNVLHRTYTWLKGHQKSNGEFWDPGRVIHSELQGGNKSPVTLTAYIVTSLLGYRKYQPNIDVQESIHFLESEFSRGISDNYTLALITYALSSVGSPKAKEALNMLTWRAEQEGGMQFWVSSESKLSDSWQPRSLDIEVAAYALLSHFLQFQTSEGIPIMRWLSRQRNSLGGFASTQDTTVALKALSEFAALMNTERTNIQVTVTGPSSPSPVKFLIDTHNRLLLQTAELAVVQPMAVNISANGFGFAICQLNVVYNVKASGSSRRRRSIQNQEAFDLDVAVKENKDDLNHVDLNVCTSFSGPGRSGMALMEVNLLSGFMVPSEAISLSETVKKVEYDHGKLNLYLDSVNETQFCVNIPAVRNFKVSNTQDASVSIVDYYEPRRQAVRSYNSEVKLSSCDLCSDVQGCRPCEDGASGSHHHSSVIFIFCFKLLYFMELWL

SEQ ID NO: 12 - protein, 290 aa, Homo sapiens
MMPQEQYTHHRSTMPGSVGPQVYKVGIYGWRKRCLYFFVLLLMILILVNLAMTIWILKVMNFTIDGMGNLRITEKGLKLEGDSEFLQPLYAKEIQSQPGNALYFKSARNVTVNILNDQTKVLTQLITGPKAVEAYGKKFEVKTVSGKLLFSADNNEVVVGAERLRVLGAEGTVFPKSIETPNVRADPFKELRLESPTRSLVMEAPKGVEINAEAGNMEATCRTELRLESKDGEIKLDAAKIRLPRLPHGSYTPTGTRQKVFEICVCANGRLFLSQAGAGSTCQINTSVCL

SEQ ID NO: 13 - protein, 132 aa, Homo sapiens
MNHIVQTFSPVNSGQPPNYEMLKEEQEVAMLGGPHNPAPPTSTVIHIRSETSVPDHVVWSLFNTLFMNTCCLGFIAFAYSVKSRDRKMVGDVTGAQAYASTAKCLNIWALILGIFMTILLVIIPVLVVQAQR

SEQ ID NO: 14 - protein, 699 aa, Homo sapiens [sequence omitted]

SEQ ID NO: 15 - protein, 288 aa, Homo sapiens [sequence omitted]

SEQ ID NO: 16 - protein, 645 aa, Homo sapiens
GASCSLSPTSLAETVHCDLQPVGPERGEVTYTTSQVSKGCVAQAPNAILEVHVLFLEFPTGPSQLELTLQASKQNGTWPREVLLVLSVNSSVFLHLQALGIPLHLAYNSSLVTFQEPPGVNTTELPSFPKTQILEWAAERGPITSAAELNDPQSILLRLGQAQGSLSFCMLEASQDMGRTLEWRPRTPALVRGCHLEGVAGHKEAHILRVLPGHSAGPRTVTVKVELSCAPGDLDAVLILQGPPYVSWLIDANHNMQIWTTGEYSFKIFPEKNIRGFKLPDTPQGLLGEARMLNASIVASFVELPLASIVSLHASSCGGRLQTSPAPIQTTPPKDTCSPELLMSLIQTKCADDAMTLVLKKELVAHLKCTITGLTFWDPSCEAEDRGDKFVLRSAYSSCGMQVSASMISNEAVVNILSSSSPQRKKVHCLNMDSLSFQLGLYLSPHFLQASNTIEPGQQSFVQVRVSPSVSEFLLQLDSCHLDLGPEGGTVELIQGRAAKGNCVSLLSPSPEGDPRFSFLLHFYTVPIPKTGTLSCTVALRPKTGSQDQEVHRTVFMRLNIISPDLSGCTSKGLVLPAVLGITFGAFLIGALLTAALWYIYSHTRSPSKREPVVAVAAPASSESSSTNHSIGSTQSTPCSTSSMA

SEQ ID NO: 17 - protein, 387 aa, Homo sapiens
MPRPRLLAALCGALLCAPSLLVALDICSKNPCHNGGLCEEISQEVRGDVFPSYTCTCLKGYAGNHCETKCVEPLGMENGNIANSQIAASSVRVTFLGLQHWVPELARLNRAGMVNAWTPSSNDDNPWIQVNLLRRMWVTGVVTQGASRLASHEYLKAFKVAYSLNGHEFDFIHDVNKKHKEFVGNWNKNAVHVNLFETPVEAQYVRLYPTSCHTACTLRFELLGCELNGCANPLGLKNNSIPDKQITASSSYKTWGLHLFSWNPSYARLDKQGNFNAWVAGSYGNDQWLQVDLGSSKEVTGIITQGARNFGSVQFVASYKVAYSNDSANWTEYQDPRTGSSKIFPGNWDNHSHKKNLFETPILARYVRILPVAWHNRIALRLELLGC

SEQ ID NO: 18 - protein, 594 aa, Homo sapiens
FGGSRAGPLSGKKFGNPGEKLVKKKWNLDELPKFEKNFYQEHPDLARRTAQEVETYRRSKEITVRGHNCPKPVLNFYEANFPANVMDVIARQNFTEPTAIQAQGWPVALSGLDMVGVAQTGSGKTLSYLLPAIVHINHQPFLERGDGPICLVLAPTRELAQQVQQVAAEYCRACRLKSTCIYGGAPKGPQIRDLERGVEICIATPGRLIDFLECGKTNLRRTTYLVLDEADRMLDMGFEPQIRKIVDQIRPDRQTLMWSATWPKEVRQLAEDFLKDYIHINIGALELSANHNILQIVDVCHDVEKDEKLIRLMEEIMSEKENKTIVFVETKRRCDELTRKMRRDGWPAMGIHGDKSQQERDWVLNEFKHGKAPILIATDVASRGLDVEDVKFVINYDYPNSSEDYIHRIGRTARSTKTGTAYTFFTPNNIKQVSDLISVLREANQAINPKLLQLVEDRGSGRSRGRGGMKDDRRDRYSAGKRGGFNTFRDRENYDRGYSSLLKRDFGAKTQNGVYSAANYTNGSFGSNFVSAGIQTSFRTGNPTGTYQNGYDSTQQYGSNVPNMHNGMNQQAYAYPATAAAPMIGYPMPTGYSQ

SEQ ID NO: 19 - protein, 669 aa, Homo sapiens
MMRLRGSGMLRDLLLRSPAGVSATLRRAQPLVTLCRRPRGGGRPAAGPAAAARLHPWWGGGGWPAEPLARGLSSSPSEILQELGKGSTHPQPGVSPPAAPAAPGPKDGPGETDAFGNSEGKELVASGENKIKQGLLPSLEDLLFYTIAEGQEKIPVHKFITALKSTGLRTSDPRLKECMDMLRLTLQTTSDGVMLDKDLFKKCVQSNIVLLTQAFRRKLVIPDFMSFTSHIDELYESAKKQSGGKVADYIPQLAKFSPDLWGVSVCTVDGQRHSTGDTKVPFCLQSCVKPLKYAIAVNDLGTEYVHRYVGKEPSGLRFNKLFLNEDDKPHNPMVNAGAIVVTSLIKQGVNNAEKFDYVMQFLNKMAGNEYVGFSNATFQSERESGDRNFAIGYYLKEKKCFPEGTDMVGILDFYFQLCSIEVTCESASVMAATLANGGFCPITGERVLSPEAVRNTLSLMHSCGMYDFSGQFAFHVGLPAKSGVAGGILLVVPNVMGMMCWSPPLDKMGNSVKGIHFCHDLVSLCNFHNYDNLRHFAKKLDPRREGGDQRVKSVINLLFAAYTGDVSALRRFALSAMDMEQRDYDSRTALHVAAAEGHVEVVKFLLEACKVNPFPKDRWNNTPMDEALHFGHHDVFKILQEYQVQYTPQGDSDNGKENQTVHKNLDGLL

SEQ ID NO: 20 - protein, 355 aa, Homo sapiens
  MOD_RES (343): variable amino acid
MGCTVSAEDKAAAERSKMIDKNLREDGEKAAREVKLLLLGAGESGKSTIVKQMKIIHEDGYSEEECRQYRAVVYSNTIQSIMAIVKAMGNLQIDFADPSRADDARQLFALSCTAEEQGVLPDDLSGVIRRLWADHGVQACFGRSREYQLNDSAAYYLNDLERIAQSDYIPTQQDVLRTRVKTTGIVETHFTFKDLHFKMFDVGGQRSERKKWIHCFEGVTAIIFCVALSAYDLVLAEDEEMNRMHESMKLFDSICNNKWFTDTSIILFLNKKDLFEEKITHSPLTICFPEYTGANKYDEAASYIQSKFEDLNKRKDTKEIYTHFTCATDTKNVQFVFDAVTDXIIKNNLKDCGLF

SEQ ID NO: 21 - protein, 219 aa, Homo sapiens
MASVTDGKHGVKDASDQNFDYMFKLLIIGNSSVGKTSFLLRYADDTFTPAFVSTVGIDFKVKTVYRHEKRVKLQIWDTAGQERYRTITTAYYRGAMGFILMYDITNEESFNAVQDWATQIKTYSWDNAQVILVGNKCDMEEERVVPTEKGQLLAEQLGFDFFEASAKENISVRQAFERLVDAICDKMSDSLDTDPSMLGSSKNTRLSDTPPLLQQNCSC

SEQ ID NO: 22 - protein, 917 aa, Homo sapiens
MIAAQLLAYYFTELKDDQVKKIDKYLYAMRLSDETLIDIMTRFRKEMKNGLSRDFNPTATVKMLPTFVRSIPDGSEKGDFIALDLGGSSFRILRVQVNHEKNQNVHMESEVYDTPENIVHGSGSQLFDHVAECLGDFMEKRKIKDKKLPVGFTFSFPCQQSKIDEAILITWTKRFKASGVEGADVVKLLNKAIKKRGDYDANIVAVVNDTVGTMMTCGYDDQHCEVGLIIGTGTNACYMEELRHIDLVEGDEGRMCINTEWGAFGDDGSLEDIRTEFDREIDRGSLNPGKQLFEKMVSGMYLGELVRLILVKMAKEGLLFEGRITPELLTRGKFNTSDVSAIEKNKEGLHNAKEILTRLGVEPSDDDCVSVQHVCTIVSFRSANLVAATLGAILNRLRDNKGTPRLRTTVGVDGSLYKTHPQYSRRFHKTLRRLVPDSDVRFLLSESGSGKGAAMVTAVAYRLAEQHRQIEETLAHFHLTKDMLLEVKKRMRAEMELGLRKQTHNNAVVKMLPSFVRRTPDGTENGDFLALDLGGTNFRVLLVKIRSGKKRTVEMHNKIYAIPIEIMQGTGEELFDHIVSCISDFLDYMGIKGPRMPLGFTFSFPCQQTSLDAGILITWTKGFKATDCVGHDVVTLLRDAIKRREEFDLDVVAVVNDTVGTMMTCAYEEPTCEVGLIVGTGSNACYMEEMKNVEMVEGDQGQMCINMEWGAFGDNGCLDDIRTHYDRLVNEYSLNAGKQRYEKMISGMYLGEIVRNILIDFTKKGFLFRGQISETMKTRGIFETKFLSQIESDRLALLQVRAILQQLGLNSTCDDSILVKTVCGVVSRRAAQLCGAGMAAVVDKIRENRGLDRLNVTVGVDGTLYKLHPHFSRIMHQTVKELSPKCNVSFLLSEDGSGKGAALITAVGVRLRTEASS

SEQ ID NO: 23 - protein, 798 aa, Homo sapiens
MNLQPIFWIGLISSVCCVFAQTDENRCLKANAKSCGECIQAGPNCGWCTNSTFLQEGMPTSARCDDLEALKKKGCPPDDIENPRGSKDIKKNKNVTNRSKGTAEKLKPEDITQIQPQQLVLRLRSGEPQTFTLKFKRAEDYPIDLYYLMDLSYSMKDDLENVKSLGTDLMNEMRRITSDFRIGFGSFVEKTVMPYISTTPAKLRNPCTSEQNCTSPFSYKNVLSLTNKGEVFNELVGKQRISGNLDSPEGGFDAIMQVAVCGSLIGWRNVTRLLVFSTDAGFHFAGDGKLGGIVLPNDGQCHLENNMYTMSHYYDYPSIAHLVQKLSENNIQTIFAVTEEFQPVYKELKNLIPKSAVGTLSANSSNVIQLIIDAYNSLSSEVILENGKLSEGVTISYKSYCKNGVNGTGENGRKCSNISIGDEVQFEISITSNKCPKKDSDSFKIRPLGFTEEVEVILQYICECECQSEGIPESPKCHEGNGTFECGACRCNEGRVGRHCECSTDEVNSEDMDAYCRKENSSEICSNNGECVCGQCVCRKRDNTNEIYSGKFCECDNFNCDRSNGLICGGNGVCKCRVCECNPNYTGSACDCSLDTSTCEASNGQICNGRGICECGVCKCTDPKFQGQTCEMCQTCLGVCAEHKECVQCRAFNKGEKKDTCTQECSYFNITKVESRDKLPQPVQPDPVSHCKEKDVDDCWFYFTYSVNGNNEVMVHVVENPECPTGPDIIPIVAGVVAGIVLIGLALLLIWKLLMIIHDRREFAKFEKEKMNAKWDTGENPIYKSAVTTVVNPKYEGK

SEQ ID NO: 24 - protein, 1181 aa, Homo sapiens
MGPERTGAAPLPLLLVLALSQGILNCCLAYNVGLPEAKIFSGPSSEQFGYAVQQFINPKGNWLLVGSPWSGFPENRMGDVYKCPVDLSTATCEKLNLQTSTSIPNVTEMKTNMSLGLILTRNMGTGGFLTCGPLWAQQCGNQYYTTGVCSDISPDFQLSASFSPATQPCPSLIDVVVVCDESNSIYPWDAVKNFLEKFVQGLDIGPTKTQVGLIQYANNPRVVFNLNTYKTKEEMIVATSQTSQYGGDLTNTFGAIQYARKYAYSAASGGRRSATKVMVVVTDGESHDGSMLKAVIDQCNHDNILRFGIAVLGYLNRNALDTKNLIKEIKAIASIPTERYFFNVSDEAALLEKAGTLGEQIFSIEGTVQGGDNFQMEMSQVGFSADYSSQNDILMLGAVGAFGWSGTIVQKTSHGHLIFPKQAFDQILQDRNHSSYLGYSVAAISTGESTHFVAGAPRANYTGQIVLYSVNENGNITVIQAHRGDQIGSYFGSVLCSVDVDKDTITDVLLVGAPMYMSDLKKEEGRVYLFTIKKGILGQHQFLEGPEGIENTRFGSAIAALSDINMDGFNDVIVGSPLENQNSGAVYIYNGHQGTIRTKYSQKILGSDGAFRSHLQYFGRSLDGYGDLNGDSITDVSIGAFGQVVQLWSQSIADVAIEASFTPEKITLVNKNAQIILKLCFSAKFRPTKQNNQVAIVYNITLDADGFSSRVTSRGLFKENNERCLQKNMVVNQAQSCPEHIIYIQEPSDVVNSLDLRVDISLENPGTSPALEAYSETAKVFSIPFHKDCGEDGLCISDLVLDVRQIPAAQEQPFIVSNQNKRLTFSVTLKNKRESAYNTGIVVDFSENLFFASFSLPVDGTEVTCQVAASQKSVACDVGYPALKREQQVTFTINFDFNLQNLQNQASLSFQALSESQEENKADNLVNLKIPLLYDAEIHLTRSTNINFYEISSDGNVPSIVHSFEDVGPKFIFSLKVTTGSVPVSMATVIIHIPQYTKEKNPLMYLTGVQTDKAGDISCNADINPLKIGQTSSSVSFKSENFRHTKELNCRTASCSNVTCWLKDVHMKGEYFVNVTTRIWNGTFASSTFQTVQLTAAAEINTYNPEIYVIEDNTVTIPLMIMKPDEKAEVPTGVIIGSIIAGILLLLALVAILWKLGFFKRKYEKMTKNPDEIDETTELSS

SEQ ID NO: 25 - protein, 885 aa, Homo sapiens
MVALSHLGSALQLGSLCFPRSPFRLLGKRSLPEGVANGIEVYSTKINSKVTSRFAHNVVTMRAVNRADTAKEVSFDVELPKTAFITNFTLTIDGVTYPGNVKEKEVAKKQYEKAVSQGKTAGLVKASGRKLEKFTVSVNVAAGSKVTFELTYEELLKRHKGKYEMYLKVQPKQLVKHFEIEVDIFEPQGISMLDAEASFITNDLLGSALTKSFSGKKGHVSFKPSLDQQRSCPTCTDSLLNGDFTITYDVNRESPGNVQIVNGYFVHFFAPQGLPVVPKNVAFVIDISGSMAGRKLEQTKEALLRILEDMKEEDYLNFILFSGDVSTWKEHLVQATPENLQEARTFVKSMEDKGMTNINDGLLRGISMLNKAREEHRIPERSTSIVIMLTDGDANVGESRPEKIQENVRNAIGGKFPLYNLGFGNNLNYNFLENMALENHGFARRIYEDSDADLQLQGFYEEVANPLLTGVEMEYPENAILDLTQNTYQHFYDGSEIVVAGRLVDEDMNSFKADVKGHGATNDLTFTEEVDMKEMEKALQERDYIFGNYIERLWAYLTIEQLLEKRKNAHGEEKENLTARALDLSLKYHFVTPLTSMVVTKPEDNEDERAIADKPGEDAEATPVSPAMSYLTSYQPPQNPYYYVDGDPHFIIQIPEKDDALCFNIDEAPGTVLRLIQDAVTGLTVNGQITGDKRGSPDSKTRKTYFGKLGIRNAQMDFQVEVTTEKITCGTGRASTFSWLDTVTVTQDGLSMMINRKNMVVSFGDGVTFVVVLHQVWKKHPVHRDFLGFYVVDSHRMSAQTHGLLGQFFQPFDFKVSDIRPGSDPTKPDATLVVKNHQLIVTRGSQKDYRKDASIGTKVVCWFVHNNGEGLIDGVHTDYIVPNLF

SEQ ID NO: 26 - protein, 416 aa, Homo sapiens; identical to SEQ ID NO: 10

SEQ ID NO: 27 - protein, 215 aa, Homo sapiens
MAVEGGMKCVKFLLYVLLLAFCGATPGSLLPVVIIAVGVFLFLVAFVGCCGACKENYCLMITFAIFLSLIMLVEVAAAIAGYVFRDKVMSEFNNNFRQQMENYPKNNHTASILDRMQADFKCCGAANYTDWEKIPSMSKNRVPDSCCINVTVGCGINFNEKAIHKEGCVEKIGGWLRKNVLVVAAAALGIAFVEVLGIVFACCLVKSIRSGYEVM

SEQ ID NO: 28 - protein, 582 aa, Homo sapiens [sequence omitted]

SEQ ID NO: 29 - protein, 1450 aa, Homo sapiens
SVSGKPQYMVLVPSLLHTETTEKGCVLLSYLNETVTVSALESVRGNRSLFTDLEAENDVLHCVAFAVPKSSSNEEVMFLTVQVKGPTQEFKKRTTVMVKNEDSLVFVQTDKSIYKPGQTVKFRVVSMDENFHPLNELIPLVYIQDPKGNRIAQWQSFQLEGGLKQFSFPLSSEPFQGSYKVVVQKKSGGRTEHPFTVEEFVLPKFEVQVTVPKIITILEEEMNVSVCGLYTYGKPVPGHVTVSICRKYSDASDCHGEDSQAFCEKFSGQLNSHGCFYQQVKTKVFQLKRKEYEMKLHTEAQIQEEGTVVELTGRQSSEITRTITKLSFVKVDSHFRQGIPFFGQVRLVDGKGVPIPNKVIFIRGNEANYYSNATTDEHGLVQFSINTTNVMGTSLTVRVNYKDRSPCYGYQWVSEEHEEAHHTAYLVFSPSKSFVHLEPMSHELPCGHTQTVQAHYILNGGTLLGLKKLSFYYLIMAKGGIVRTGTHGLLVKQEDMKGHFSISIPVKSDIAPVARLLIYAVLPTGDVIGDSAKYDVENELANKVDLSFSPSQSLPASHAHLRVTAAPQSVCALRAVDQSVLLMKPDAELSASSVYNLLPEKDLTGFPGPLNDQDDEDCINRHNVYINGITYTPVSSTNEKDMYSFLEDMGLKAFTNSKIRKPKMCPQLQQYEMHGPEGLRVGFYESDVMGRGHARLVHVEEPHTETVRKYFPETWIWDLVVVNSAGVAEVGVTVPDTITEWKAGAFCLSEDAGLGISSTASLRAFQPFFVELTMPYSVIRGEAFTLKATVLNYLPKCIRVSVQLEASPAFLAVPVEKEQAPHCICANGRQTVSWAVTPKSLGNVNFTVSAEALESQELCGTEVPSVPEHGRKDTVIKPLLVEPEGLEKETTFNSLLCPSGGEVSEELSLKLPPNVVEESARASVSVLGDILGSAMQNTQNLLQMPYGCGEZNMVLFAPNIYVLDYLNETQQLTPEIKSKAIGYLNTGYQRQLNYKHYDGSYSTFGERYGRNQGNTWLTAFVLKTFAQARAYIFIDEAHITQALIWLSQRQKDNGCFRSSGSLLNNAIKGGVEDEVTLSAYIKIALLEIPLTVTHPVVRNALFCLESAWKTAEEGDHGSHVYTKALLAYAFALAGNQDKRKEVLKSLNEEAVKKDNSVHWERPQKPKAPVGHFYEPQAPSAEVEMTSYVLLAYLTAQPAPTSEDLTSATNIVKWITKQQNAQGGFSSTQDKVVALHALSKYGAATFTRTGKAAQVTIQSSGTFSSKFQVDNNNRLLLQQVSLPELPGEYSMKVTGEGCVYLQTSLKYNILPEKEEFPFALGVQTLPQTCDEPKAHTSFQISLSVSYTGSRSASNMAIVDVKMVSGFIPLKPTVKMLERSNHVSRTEVSSNHVLIYLDKVSNQTLSLFFTVLQDVPVRDLKPAIVKVYDYYETDEFAIAEYNAPCSKDLGNA

SEQ ID NO: 30 - protein, 967 aa, Homo sapiens
MAKGFYISKSLGILGILLGVAAVCTIIALSVVYSQEKNKNANSSPVASTTPSASATTNPASATTLDQSKAWNRYRLPNTLKPDSYRVTLRPYLTPNDRGLYVFKGSSTVRFTCKEATDVIIIHSKKLNYTLSQGHRVVLRGVGGSQPPDIDKTELVEPTEYLVVHLKGSLVKDSQYEMDSEFEGELADDLAGFYRSEYMEGNVRKVVATTQMQAADARKSFPCFDEPAMKAEFNITLIHPKDLTALSNMLPKGPSTPLPEDPNWNVTEFHTTPKMSTYLLAFIVSEFDYVEKQASNGVLIRIWARPSAIAAGHGDYALNVTGPILNFFAGHYDTPYPLPKSDQIGLPDFNAGAMENWGLVTYRENSLLFDPLSSSSSNKERVVTVIAHELAHQWFGNLVTIEWWNDLWLNEGFASYVEYLGADYAEPTWNLKDLMVLNDVYRVMAVDALASSHPLSTPASEINTPAQISELFDAISYSKGASVLRMLSSFLSEDVFKQGLASYLHTFAYQNTIYLNLWDHLQEAVNNRSIQLPTTVRDIMNRWTLQMGFPVITVDTSTGTLSQEHFLLDPDSNVTRPSEFNYVWIVPITSIRDGRQQQDYWLIDVRAQNDLFSTSGNEWVLLNLNVTGYYRVNYDEENWRKIQTQLQRDHSAIPVINRAQIINDAFNLASAHKVPVTLALNNTLFLIEERQYMPWEAALSSLSYFKLMFDRSEVYGPMKNYLKKQVTPLFIHFRNNTNNWREIPENLMDQYSEVNAISTACSNGVPECEEMVSGLFKQWMENPNNNPIHPNLRSTVYCNAIAQGGEEEWDFAWEQFRNATLVNEADKLRAALACSKELWILNRYLSYTLNPDLIRKQDATSTIISITNNVIGQGLVWDFVQSNWKKLFNDYGGGSFSFSNLIQAVTRRFSTEYELQQLEQFKKDNEETGFGSGTRALEQALEKTKANIKWVKENKEVVLQWFTENSK

SEQ ID NO: 31 - protein, 967 aa, Homo sapiens
MAKGFYISKSLGILGILLGVAAVCTIIALSVVYSQEKNKNANSSPVASTTPSASATTNPASATTLDQSKAWNRYRLPNTLKPDSYQVTLRPYLTPNDRGLYVFKGSSTVRFTCKEATDVIIIHSKKLNYTLSQGHRVVLRGVGGSQPPDIDKTELVEPTEYLVVHLKGSLVKDSQYEMDSEFEGELADDLAGFYRSEYMEGNVRKVVATTQMQAADARKSFPCFDEPAMKAEFNITLIHPKDLTALSNMLPKGPSTPLPEDPNWNVTEFHTTPKMSTYLLAFIVSEFDYVEKQASNGVLIRIWARPSAIAAGHGDYALNVTGPILNFFAGHYDTPYPLPKSDQIGLPDFNAGAMENWGLVTYRENSLLFDPLSSSSSNKERVVTVIAHELAHQWFGNLVTIEWWNDLWLNEGFASYVEYLGADYAEPTWNLKDLMVLNDVYRVMAVDALASSHPLSTPASEINTPAQISELFDAISYSKGASVLRMLSSFLSEDVFKQGLASYLHTFAYQNTIYLNLWDHLQEAVNNRSIQLPTTVRDIMNRWTLQMGFPVITVDTSTGTLSQEHFLLDPDSNVTRPSEFNYVWIVPITSIRDGRQQQDYWLIDVRAQNDLFSTSGNEWVLLNLNVTGYYRVNYDEENWRKIQTQLQRDHSAIPVINRAQIINDAFNLASAHKVPVTLALNNTLFLIEERQYMPWEAALSSLSYFKLMFDRSEVYGPMKNYLKKQVTPLFIHFRNNTNNWREIPENLMDQYSEVNAISTACSNGVPECEEMVSGLFKQWMENPNNNPIHPNLRSTVYCNAIAQGGEEEWDFAWEQFRNATLVNEADKLRAALACSKELWILNRYLSYTLNPDLIRKQDATSTIISITNNVIGQGLVWDFVQSNWKKLFNDYGGGSFSFSNLIQAVTRRFSTEYELQQLEQFKKDNEETGFGSGTRALEQALEKTKANIKWVKENKEVVLQWFTENSK

SEQ ID NO: 32 - protein, 893 aa, Homo sapiens
MATEEFIIRIPPYHYIHVLDQNSNVSRVEVGPKTYIRQDNERVLFAPMRMVTVPPRHYCTVANPVSRDAQGLVLFDVTGQVRLRHADLEIRLAQDPFPLYPGEVLEKDITPLQVVLPNTALHLKALLDFEDKDGDKVVAGDEWLFEGPGTYIPRKEVEVVEIIQATIIRQNQALRLRARKECWDRDGKERVTGEEWLVTTVGAYLPAVFEEVLDLVDAVILTEKTALHLRARRNFRDFRGVSRRTGEEWLVTVQDTEAHVPDVHEEVLGVVPITTLGPHNYCVILDPVGPDGKNQLGQKRVVKGEKSFFLQPGEQLEQGIQDVYVLSEQQGLLLRALQPLEEGEDEEKVSHQAGDHWLIRGPLEYVPSAKVEVVEERQAIPLDENEGIYVQDVKTGKVRAVIGSTYMLTQDEVLWEKELPPGVEELLNKGQDPLADRGEKDTAKSLQPLAPRNKTRVVSYRVPHNAAVQVYDYREKRARVVFGPELVSLGPEEQFTVLSLSAGRPKRPHARRALCLLLGPDFFTDVITIETADHARLQLQLAYNWHFEVNDRKDPQETAKLFSVPDFVGDACKAIASRVRGAVASVTFDDFHKNSARIIRTAVFGFETSEAKGPDGMALPRPRDQAVFPQNGLVVSSVDVQSVEPVDQRTRDALQRSVQLAIEITTNSQEAAAKHEAQRLEQEARGRLERQKILDQSEAEKARKELLELEALSMAVESTGTAKAEAESRAEAARIEGEGSVLQAKLKAQALAIETEAELQRVQKVRELELVYARAQLELEVSKAQQLAEVEVKKFKQMTEAIGPSTIRDLAVAGPEMQVKLLQSLGLKSTLITDGSTPINLFNTAFGLLGMGPEGQPLGRRVASGPSPGEGISPQSAQAPQAPGDNHVVPVLR

SEQ ID NO: 33 - protein, 289 aa, Homo sapiens
MFDKTRLPYVALDVLCVLLAGLPFAIFTSRHITSRHTPFQRGVFCNDESIKYPYKEDTIPYALLGGIIIPFSIIVIILGETLSVYCNLLHSNSFIRNNYIATIYKAIGTFLFGAAASQSLTDIAKYSIGRLRPHFLDVCDPDWSKINCSDGYIEYYICRGNAERVKEGRLSFYSGHSSFSMYCMLFVALYLQARMKGDWARLLRPTLQFGLVAVSIYVGLSRVSDYKHHWSDVLTGLIQGALVAILVAVYVSDFFKERTSFKERKEEDSHTTLHETPTTGNHYPSNHQP

SEQ ID NO: 34 - protein, 1241 aa, Homo sapiens
MTNPSDRVLPANSMAESREGDFGCTVMELRKLMELRSRDALTQINVHYGGVQNLCSRLKTSPVEGLSGNPADLEKRRQVFGHNVIPPKKPKTFLELVWEALQDVTLIILEIAAIISLVLSFYRPAGEENELCGQVATTPEDENEAQAGWIEGAAILFSVIIVVLVTAFNDWSKEKQFRGLQCRIEQEQKFSIIRNGQLIQLPVAEIVVGDIAQVKYGDLLPADGILIQGNDLKIDESSLTGESDHVKKSLDKDPMLLSGTHVMEGSGRMVVTAVGVNSQTGIILTLLGVNEDDEGEKKKKGKKQGVPENRNKAKTQDGVALEIQPLNSQEGIDNEEKDKKAVKVPKKEKSVLQGKLTRLAVQIGKAGLLMSALTVFILILYFVIDNFVINRRPWLPECTPIYIQYFVKFFIIGITVLVVAVPEGLPLAVTISLAYSVKKMMKDNNLVRHLDACETMGNATAICSDKTGTLTMNRMTVVQAYIGGIHYRQIPSPDVFLPKVLDLIVNGISINSAYTSKILPPEKEGGLPRQVGNKTECALLGFVTDLKQDYQAVRNEVPEEKLYKVYTFNSVRKSMSTVIRNPNGGFRMYSKGASEIILRKCNRILDRKGEAVPFKNKDRDDMVRTVIEPMACDGLRTICIAYRDFDDTEPSWDNENEILTELTCIAVVGIEDPVRPEVPDAIAKCKQAGITVRMVTGDNINTARAIATKCGILTPGDDFLCLEGKEFNRLIRNEKGEVEQEKLDKIWPKLRVLARSSPTDKHTLVKGIIDSTVGEHRQVVAVTGDGTNDGPALKKADVGFAMGIAGTDVAKEASDIILTDDNFTSIVKAVMWGRNVYDSISKFLQFQLTVNVVAVIVAFTGACITQDSPLKAVQMLWVNLIMDTFASLALATEPPTESLLKRRPYGRNKPLISRTMMKNILGHAFYQLIVIFILVFAGEKFFDIDSGRKAPLHSPPSQHYTIVFNTFVLMQLFNEINSRKIHGEKNVFSGIYRNIIFCSVVLGTFICQIFIVEFGGKPFSCTSLSLSQWLWCLFIGIGELLWGQFISAIPTRSLKFLKEAGHGTTKEEITKDAEGLDEIDHAEMELRRGQILWFRGLNRIQTQIDVINTFQTGASFKGVLRRQNMGQHLDVKLVPSSSYIKVVKAFHSSLHESIQKPYNQKSIHSFMTHPEFAIEEELPRTPLLDEEEEENPDKASKFGTRVLLLDGEVTPYANTNNNAVDCNQVQLPQSDSSLQSLETSV

SEQ ID NO: 35 - protein, 398 aa, Homo sapiens
MNWHLPLFLLASVTLPSICSHFNPLSLEELGSNTGIQVFNQIVKSRPHDNIVISPHGIASVLGMLQLGADGRTKKQLAMVMRYGVNGVGKILKKINKAIVSKKNKDIVTVANAVFVKNASEIEVPFVTRNKDVFQCEVRNVNFEDPASACDSINAWVKNETRDMIDNLLSPDLIDGVLTRLVLVNAVYFKGLWKSRFQPENTKKRTFVAADGKSYQVPMLAQLSVFRCGSTSAPNDLWYNFIELPYHGESISMLIALPTESSTPLSAIIPHISTKTIDSWMSIMVPKRVQVILPKFTAVAQTDLKEPLKVLGITDMFDSSKANFAKITTGSENLHVSHILQKAKIEVSEDGTKASAATTAILIARSSPPWFIVDRPFLFFIRHNPTGAVLFMGQINKP

SEQ ID NO: 36 - protein, 1482 aa, Homo sapiens
MRKDRLLHLCLVLLLILLSASDSNSTEPQYMVLVPSLLHTEAPKKGCVLLSHLNETVTVSASLESGRENRSLFTDLVAEKDLFHCVSFTLPRISASSEVAFLSIQIKGPTQDFRKRNTVLVLNTQSLVFVQTDKPMYKPGQTVRFRVVSVDENFRPRNELIPLIYLENPRRNRIAQWQSLKLEAGINQLSFPLSSEPIQGSYRVVVQTESGGRIQHPFTVEEFVLPKFEVKVQVPKIISIMDEKVNITVCGEYTYGKPVPGLATVSLCRKLSRVLNCDKQEVCEEFSQQLNSNGCITQQVHTKMLQITNTGFEMKLRVEARIREEGTDLEVTANRISEITNIVSKLKFVKVDSHFRQGIPFFAQVLLVDGKGVPIPNKLFFISVNDANYYSNATTNEQGLAQFSINTTSISVNKLFVRVFTVHPNLCFHYSWVAEDHQGAQHTANRVFSLSGSYIHLEPVAGTLPCGHTETITAHYTLNRQAMGELSELSFHYLIMAKGVIVRSGTHTLPVESGDMKGSFALSFPVESDVAPIARMFIFAILPDGEVVGDSEKFEIENCLANKVDLSFSPAQSPPASHAHLQVAAAPQSLCALRAVDQSVLLMKPEAELSVSSVYNLLTVKDLTNFPDNVDQQEEEQGHCPRPFFIHNGAIYVPLSSNEADIYSFLKGMGLKVFTNSKIRKPKSCSVIPSVSAGAVGQGYYGAGLGVVERPYVPQLGTYNVIPLNNEQSSGPVPETVRSYFPETWIWELVAVNSSGVAEVGVTVPDTITEWKAGAFCLSEDAGLGISSTASLRAFQPFFVELTMPYSVIRGEVFTLKATVLNYLPKCIRVSVQLKASPAFLASQNTKGEESYCICGSERQTLSWTVTPKTLGNVNFSVSAEAMQSLELCGNEVVEVPEIKRKDTVIKTLLVEAEGIEQEKTFSSMTCASGANVSEQLSLKLPSNVVKESARASFSVLGDILGSAMQNIQNLLQMPYGCGEQNMVLFAPNIYVLNYLNETQQLTQEIKAKAVGYLITGYQRQLNYKHQDGSYSTFGERYGRNQGNTWLTAFVLKTFAQARSYIFIDEAHITQSLTWLSQMQKDNGCFRSSGSLLNNAIKGGVEDEATLSAYVTIALLEIPLPVTNPIVRNALFCLESAWNVAKEGTHGSHVYTKALLAYAFSLLGKQNQNREILNSLDKEAVKEDNLVHWERPQRPKAPVGHLYQTQAPSAEVEMTSYVLLAYLTAQPAPTSGDLTSATNIVKWIMKQQNAQGGFSSTQDTVVALHALSRYGAATFTRTEKTAQVTVQDSQTFSTNFQVDNNNLLLLQQISLPELPGEYVITVTGERCVYLQTSMKYNILPEKEDSPFALKVQTVPQTCDGHKAHTSFQISLTISYTGNRPASNMVIVDVKMVSGFIPLKPTVKMLERSSSVSRTEVSNNHVLIYVEQVTNQTLSFSFMVLQDIPVGDLKPAIVKVYDYYETDESVVAEYIAPCSTDTEHGNV

SEQ ID NO: 37 - protein, 321 aa, Homo sapiens [sequence omitted]

SEQ ID NO: 38 - protein, 560 aa, Homo sapiens; identical to SEQ ID NO: 8

SEQ ID NO: 39 - protein, 709 aa, Homo sapiens
MAETLEFNDVYQEVKGSMNDGRLRLSRQGIIFKNSKTGKVDNIQAGELTEGIWRRVALGHGLKLLTKNGHVYKYDGFRESEFEKLSDFFKTHYRLELMEKDLCVKGWNWGTVKFGGQLLSFDIGDQPVFEIPLSNVSQCTTGKNEVTLEFHQNDDAEVSLMEVRFYVPPTQEDGVDPVEAFAQNVLSKADVIQATGDAICIFRELQCLTPRGRYDIRIYPTFLHLHGKTFDYKIPYTTVLRLFLLPHKDQRQMFFVISLDPPIKQGQTRYHFLILLFSKDEDISLTLNMNEEEVEKRFEGRLTKNMSGSLYEMVSRVMKALVNRKITVPGNFQGHSGAQCITCSYKASSGLLYPLERGFIYVHKPPVHIRFDEISFVNFARGTTTTRSFDFEIETKQGTQYTFSSIEREEYGKLFDFVNAKKLNIKNRGLKEGMNPSYDEYADSDEDQHDAYLERMKEEGKIREENANDSSDDSGEETDESFNPGEEEEDVAEEFDSNASASSSSNEGDSDRDEKKRKQLKKAKMAKDRKSRKKPVEVKKGKDPNAPKRPMSAYMLWLNASREKIKSDHPGISITDLSKKAGEIWKGMSKEKKEEWDRKAEDARRDYEKAMKEYEGGRGESSKRDKSKKKKKVKVKMEKKSTPSRGSSSKSSSRQLSESFKSKEFVSSDESSSGENKSKKKRRRSEDSEEEELASTPPSSEDSASGSDE

SEQ ID NO: 40 - protein, 298 aa, Homo sapiens
MSLYPSLEDLKVDKVIQAQTAFSANPANPAILSEASAPIPHDGNLYPRLYPELSQYMGLSLNEEEIRASVAVVSGAPLQGQLVARPSSINYMVAPVTGNDVGIRRAEIKQGIREVILCKDQDGKIGLRLKSIDNGIFVQLVQANSPASLVGLRFGDQVLQINGENCAGWSSDKAHKVLKQAFGEKITMTIRDRPFERTITMHKDSTGHVGFIFKNGKITSIVKDSSAARNGLLTEHNICEINGQNVIGLKDSQIADILSTSGTVVTITIMPAFIFEHIIKRMAPSIMKSLMDHTIPEV

SEQ ID NO: 41 - protein, 296 aa, Homo sapiens
  MOD_RES (25): variable amino acid
MAEKRHTRDSEAQRLPDSFKGWSPXSPDHSPSKGLGPCGWILVAFSFLFTVITFPISIWMCIKIIKEYERAIIFRLGRILQGGAKGPGLFFILPCTDSFIKVDMRTISFDIPPQEILTKDSVTISVDGVVYYRVQNATLAVANITNADSATRLLAQTTLRNVLGTKNLSQILSDREEIAHNMQSTLDDATDAWGIKVERVEIKDVKLPVQLQRAMAAEAEASREARAKVIAAEGEMNASRALKEASMVITESPAALQLRYLQTLTTIAAEKNSTIVFPLPIDMLQGIIGAKHSHLG

SEQ ID NO: 42 - protein, 687 aa, Homo sapiens
MAEELVLERCDLELETNGRDHHTADLCREKLVVRRGQPFWLTLHFEGRNYEASVDSLTFSVVTGPAPSQEAGTKARFPLRDAVEEGDWTATVVDQQDCTLSLQLTTPANAPIGLYRLSLEASTGYQGSSFVLGHFILLFNAWCPADAVYLDSEEERQEYVLTQQGFIYQGSAKFIKNIPWNFGQFEDGILDICLILLDVNPKFLKNAGRDCSRRSSPVYVGRVVSGMVNCNDDQGVLLGRWDNNYGDGVSPMSWIGSVDILRRWKNHGCQRVKYGQCWVFAAVACTVLRCLGIPTRVVTNYNSAHDQNSNLLIEYFRNEFGEIQGDKSEMIWNFHCWVESWMTRPDLQPGYEGWQALDPTPQEKSEGTYCCGPVPVRAIKEGDLSTKYDAPFVFAEVNADVVDWIQQDDGSVHKSINRSLIVGLKISTKSVGRDEREDITHTYKYPEGSSEEREAFTRANHLNKLAEKEETGMAMRIRVGQSMNMGSDFDVFAHITNNTAEEYVCRLLLCARTVSYNGILGPECGTKYLLNLNLEPFSEKSVPLCILYEKYRDCLTESNLIKVRALLVEPVINSYLLAERDLYLENPEIKIRILGEPKQKRKLVAEVSLQNPLPVALEGCTFTVEGAGLTEEQKTVEIPDPVEAGEEVKVRMDLLPLHMGLHKLVVNFESDKLKAVKGFRNVIIGPA

SEQ ID NO: 43 - protein, 466 aa, Homo sapiens
MSTRSVSSSSYRRMFGGPGTASRPSSSRSYVTTSTRTYSLGSALRPSTSRSLYASSPGGVYATRSSAVRLRSSVPGVRLLQDSVDFSLADAINTEFKNTRTNEKVELQELNDRFANYIDKVRFLEQQNKILLAELEQLKGQGKSRLGDLYEEEMRELRRQVDQLTNDKARVEVERDNLAEDIMRLREKLQEEMLQREEAENTLQSFRQDVDNASLARLDLERKVESLQEEIAFLKKLHEEEIQELQAQIQEQHVQIDVDVSKPDLTAALRDVRQQYESVAAKNLQEAEEWYKSKFADLSEAANRNNDALRQAKQESTEYRRQVQSLTCEVDALKGTNESLERQMREMEENFAVEAANYQDTIGRLQDEIQNMKEEMARHLREYQDLLNVKMALDIEIATYRKLLEGEESRISLPLPNFSSLNLRETNLDSLPLVDTHSKRTFLIKTVETRDGQVINETSQHHDDLE

SEQ ID NO: 44 - protein, 393 aa, Homo sapiens
MSDEREVAEAATGEDASSPPPKTEAASDPQHPAASEGAAAAAASPPLLRCLVLTGFGGYDKVKLQSRPAAPPAPGPGQLTLRLRACGLNFADLMARQGLYDRLPPLPVTPGMEGAGVVIAVGEGVSDRKAGDRVMVLNRSGMWQEEVTVPSVQTFLIPEAMTFEEAAALLVNYITAYMVLFDFGNLQPGHSVLVHMAAGGVGMAAVQLCRTVENVTVFGTASASKHEALKENGVTHPIDYHTTDYVDEIKKISPKGVDIVMDPLGGSDTAKGYNLLKPMGKVVTYGMANLLTGPKRNLMALARTWWNQFSVTALQLLQANRAVCGFHLGYLDGEVELVSGVVARLLALYNQGHIKPHIDSVWPFEKVADAMKQMQEKKNVGKVLLVPGPEKEN

SEQ ID NO: 45 - protein, 967 aa, Homo sapiens [sequence omitted]

SEQ ID NO: 46 - protein, 673 aa, Homo sapiens [sequence omitted]

SEQ ID NO: 47 - protein, 406 aa, Homo sapiens
MKQNLILLTFVSIFSLYSVHLLLKTANEGGSLLYEQLGYKAFGLVGKLAASGSITMQNIGAMSSYLFIVKYELPLVIQALTNIEDKTGLWYLNGNYLVLLVSLVVILPLSLFRNLGYLGYTSGLSLLCMVFFLIVVICKKFQVPCPVEAALIINETINTTLTQPTALVPALSRNVTENDSCRPHYFIFNSQTVYAVPILIFSFVCHPAVLPIYEELKDRSRRRMMNVSKISFFAMFLMYLLAALFGYLTFYEHVESELLHTYSSILGTDILLLIVRLAVLMAVTLTVPVVIFPIRSSVTHLLCASKDFSWWRHSLITVSILAFTNLLVIFVPTIRDIFGFIGASAASMLIFILPSAFYIKLVKKEPMKSVQKIGALFFLLSGVLVMTGSMALIVLDWVHNAPGGGH

SEQ ID NO: 48 - protein, 194 aa, Homo sapiens [sequence omitted]

SEQ ID NO: 49 - protein, 472 aa, Homo sapiens
RERSCLHLVCIRCSCDVVEMGSVLGLCSMASWIPCLCGSAPCLLCRCCPSGNNSTVTRLIYALFLLVGVCVACVMLIPGMEEQLNKIPGFCENEKGVVPCNILVGYKAVYRLCFGLAMFYLLLSLLMIKVKSSSDPRAAVHNGFWFFKFAAAIAIIIGAFFIPEGTFTTVWFYVGMAGAFCFILIQLVLLIDFAHSWNESWVEKMEEGNSRCWYAALLSATALNYLLSLVAIVLFFVYYTHPASCSENKAFISVNMLLCVGASVMSILPKIQESQPRSGLLQSSVITVYTMYLTWSAMTNEPETNCNPSLLSIIGYNTTSTVPKEGQSVQWWHAQGIIGLILFLLCVFYSSIRTSNNSQVNKLTLTSDESTLIEDGGARSDGSLEDGDDVHRAVDNERDGVTYSYSFFHFMLFLASLYIMMTLTNWYRYEPSREMKSQWTAVWVKISSSWIGIVLYVWTLVAPLVLTNRDFD

SEQ ID NO: 50 - protein, 506 aa, Homo sapiens
AMGRVVAELVSSLLGLWLLLCSCGCPEGAELRAPPDKIAIIGAGIGGTSAAYYLRQKFGKDVKIDLFEREEVGGRLATMMVQGQEYEAGGSVIHPLNLHMKRFVKDLGLSAVQASGGLLGIYNGETLVFEESNWFIINVIKLVWRYGFQFLRMHMWVEDVLDKFMRIYRYQSHDYAFSSVEKLLHALGGDDFLGMLNRTLLETLQKAGFSEKFLNEMIAPVMRVNYGQSTDINAFVGAVSLSCSDSGLWAVEGGNKLVCSGLLQASKSNLISGSVMYIEEKTKTKYTGNPTKMYEVVYQIGTETRSDFYDIVLVATPLNRKMSNITFLNFDPPIEEFHQYYQHIVTTLVKGELNTSIFSSRPIDKFGLNTVLTTDNSDLFINSIGIVPSVREKEDPEPSTDGTYVWKIFSQETLTKAQILKLFLSYDYAVKKPWLAYPHYKPPEKCPSIILHDRLYYLNGIECAASAMEMSAIAAHNAALLAYHRWNGHTDMIDQDGLYEKLKTEL

SEQ ID NO: 51 - protein, 574 aa, Homo sapiens
MCPRAARAPATLLLALGAVLWPAAGAWELTILHTNDVHSRLEQTSEDSSKCVNASRCMGGVARLFTKVQQIRRAEPNVLLLDAGDQYQGTIWFTVYKGAEVAHFMNALRYDAMALGNHEFDNGVEGLIEPLLKEAKFPILSANIKAKGPLASQISGLYLPYKVLPVGDEVVGIVGYTSKETPFLSNPGTNLVFEDEITALQPEVDKLKTLNVNKIIALGHSGFEMDKLIAQKVRGVDVVVGGHSNTFLYTGNPPSKEVPAGKYPFIVTSDDGRKVPVVQAYAFGKYLGYLKIEFDERGNVISSHGNPILLNSSIPEDPSIKADINKWRIKLDNYSTQELGKTIVYLDGSSQSCRFRECNMGNLICDAMINNNLRHTDEMFWNHVSMCILNGGGIRSPIDERNNGTITWENLAAVLPFGGTFDLVQLKGSTLKKAFEHSVHRYGQSTGEFLQVGGIHVVYDLSRKPGDRVVKLDVLCTKCRVPSYDPLKMDEVYKVILPNFLANGGDGFQMIKDELLRHDSGDQDINVVSTYISKMKVIYPAVEGRIKFSTGSHCHGSFSLIFLSLWAVIFVLYQ

SEQ ID NO: 52 - protein, 1466 aa, Homo sapiens
MMSFVQKGSWLLLALLHPTIILAQQEAVEGGCSHLGQSYADRDVWKPEPCQICVCDSGSVLCDDIICDDQELDCPNPEIPFGECCAVCPQPPTAPTRPPNGQGPQGPKGDPGPPGIPGRNGDPGIPGQPGSPGSPGPPGICESCPTGPQNYSPQYDSYDVKSGVAVGGLAGYPGPAGPPGPPGPPGTSGHPGSPGSPGYQGPPGEPGQAGPSGPPGPPGAIGPSGPAGKDGESGRPGRPGERGLPGPPGIKGPAGIPGFPGMKGHRGFDGRNGEKGETGAPGLKGENGLPGENGAPGPMGPRGAPGERGRPGLPGAAGARGNDGARGSDGQPGPPGPPGTAGFPGSPGAKGEVGPAGSPGSNGAPGQRGEPGPQGHAGAQGPPGPPGINGSPGGKGEMGPAGIPGAPGLMGARGPPGPAGANGAPGLRGGAGEPGKNGAKGEPGPRGERGEAGIPGVPGAKGEDGKDGSPGEPGANGLPGAAGERGAPGFRGPAGPNGIPGEKGPAGERGAPGPAGPRGAAGEPGRDGVPGGPGMRGMPGSPGGPGSDGKPGPPGSQGESGRPGPPGPSGPRGQPGVMGFPGPKGNDGAPGKNGERGGPGGPGPQGPPGKNGETGPQGPPGPTGPGGDKGDTGPPGPQGLQGLPGTGGPPGENGKPGEPGPKGDAGAPGAPGGKGDAGAPGERGPPGLAGAPGLRGGAGPPGPEGGKGAAGPPGPPGAAGTPGLQGMPGERGGLGSPGPKGDKGEPGGPGADGVPGKDGPRGPTGPIGPPGPAGQPGDKGEGGAPGLPGIAGPRGSPGERGETGPPGPAGFPGAPGQNGEPGGKGERGAPGEKGEGGPPGVAGPPGGSGPAGPPGPQGVKGERGSPGGPGAAGFPGARGLPGPPGSNGNPGPPGPSGSPGKDGPPGPAGNTGAPGSPGVSGPKGDAGQPGEKGSPGAQGPPGAPGPLGIAGITGARGLAGPPGMPGPRGSPGPQGVKGESGKPGANGLSGERGPPGPQGLPGLAGTAGEPGRDGNPGSDGLPGRDGSPGGKGDRGENGSPGAPGAPGHPGPPGPVGPAGKSGDRGESGPAGPAGAPGPAGSRGAPGPQGPRGDKGETGERGAAGIKGHRGFPGNPGAPGSPGPAGQQGAIGSPGPAGPRGPVGPSGPPGKDGTSGHPGPIGPPGPRGNRGERGSEGSPGHPGQPGPPGPPGAPGPCCGGVGAAAIAGIGGEKAGGFAPYYGDEPMDFKINTDEIMTSLKSVNGQIESLISPDGSRKNPARNCRDLKFCHPELKSGEYWVDPNQGCKLDAIKVFCNMETGETCISANPLNVPRKHWWTDSSAEKKHVWFGESMDGGFQFSYGNPELPEDVLDVQLAFLRLLSSRASQNITYHCKNSIAYMDQASGNVKKALKLMGSNEGEFKAEGNSKFTYTVLEDGCTKHTGEWSKTVFEYRTRKAVRLPIVDIAPYDIGGPDQEFGVDVGPVCFL

SEQ ID NO: 53 - protein, 3176 aa, Homo sapiens
MRKHRHLPLVAVFCLFLSGFPTTHAQQQQADVKNGAAADIIFLVDSSWTIGEEHFQLVREFLYDVVKSLAVGENDFHFALVQFNGNPHTEFLLNTYRTKQEVLSHISNMSYIGGTNQTGKGLEYIMQSHLTKAAGSRAGDGVPQVIVVLTDGHSKDGLALPSAELKSADVNVFAIGVEDADEGALKEIASEPLNMHMFNLENFTSLHDIVGNLVSCVHSSVSPERAGDTETLKDITAQDSADIIFLIDGSNNTGSVNFAVILDFLVNLLEKLPIGTQQIRVGVVQFSDEPRTMFSLDTYSTKAQVLGAVKALGFAGGELANIGLALDFVVENHFTRAGGSRVEEGVPQVLVLISAGPSSDEIRYGVVALKQASVFSFGLGAQAASRAELQHIATDDNLVFTVPEFRSFGDLQEKLLPYIVGVAQRHIVLKPPTIVTQVIEVNKRDIVFLVDGSSALGLANFNAIRDFIAKVIQRLEIGQDLIQVAVAQYADTVRPEFYFNTHPTKREVITAVRKMKPLDGSALYTGSALDFVRNNLFTSSAGYRAAEGIPKLLVLITGGKSLDEISQPAQELKRSSIMAFAIGNKGADQAELEEIAFDSSLVFIPAEFRAAPLQGMLPGLLAPLRTLSGTPEVHSNKRDIIFLLDGSANVGKTNFPYVRDFVMNLVNSLDIGNDNIRVGLVQFSDTPVTEFSLNTYQTKSDILGHLRQLQLQGGSGLNTGSALSYVYANHFTEAGGSRIREHVPQLLLLLTAGQSEDSYLQAANALTRAGILTFCVGASQANKAELEQIAFNPSLVYLMDDFSSLPALPQQLIQPLTTYVSGGVEEVPLAQPESKRDILFLFDGSANLVGQFPVVRDFLYKIIDELNVKPEGTRIAVAQYSDDVKVESRFDEHQSKPEILNLVKRMKIKTGKALNLGYALDYAQRYIFVKSAGSRIEDGVLQFLVLLVAGRSSDRVDGPASNLKQSGVVPFIFQAKNADPAELEQIVLSPAFILAAESLPKIGDLHPQIVNLLKSVHNGAPAPVSGEKDVVFLLDGSEGVRSGFPLLKEFVQRVVESLDVGQDRVRVAVVQYSDRTRPEFYLNSYMNKQDVVNAVRQLTLLGGPTPNTGAALEFVLRNILVSSAGSRITEGVPQLLIVLTADRSGDDVRNPSVVVKRGGAVPIGIGIGNADITEMQTISFIPDFAVAIPTFRQLGTVQQVISERVTQLTREELSRLQPVLQPLPSPGVGGKRDVVFLIDGSQSAGPEFQYVRTLIERLVDYLDVGFDTTRVAVIQFSDDPKAEFLLNAHSSKDEVQNAVQRLRPKGGRQINVGNALEYVSRNIFKRPLGSRIEEGVPQFLVLISSGKSDDEVVVPAVELKQFGVAPFTIARNADQEELVKISLSPEYVFSVSTFRELPSLEQKLLTPITTLTSEQIQKLLASTRYPPPAVESDAADIVFLIDSSEGVRPDGFAHIRDFVSRIVRRLNIGPSKVRVGVVQFSNDVFPEFYLKTYRSQAPVLDAIRRLRLRGGSPLNTGKALEFVARNLFVKSAGSRIEDGVPQHLVLVLGGKSQDDVSRFAQVIRSSGIVSLGVGDRNIDRTELQTITNDPRLVFTVREFRELPNIEERIMNSFGPSAATPAPPGVDTPPPSRPEKKKADIVFLLDGSINFRRDSFQEVLRFVSEIVDTVYEDGDSIQVGLVQYNSDPTDEFFLKDFSTKRQIIDAINKVVYKGGRHANTKVGLEHLRVNHFVPEAGSRLDQRVPQIAFVITGGKSVEDAQDVSLALTQRGVKVFAVGVRNIDSEEVGKIASNSATAFRVGNVQELSELSEQVLETLHDAMHETLCPGVTDAAKACNLDVILGFDGSRDQNVFVAQKGFESKVDAILNRISQMHRVSCSGGRSPTVRVSVVANTPSGPVEAFDFDEYQPEMLEKFRNMRSQHPYVLTEDTLKVYLNKFRQSSPDSVKVVIHFTDGADGDLADLHRASENLRQEGVRALILVGLERVVNLERLMHLEFGRGFMYDRPLRLNLLDLDYELAEQLDNIAEKACCGVPCKCSGQRGDRGPIGSIGPKGIPGEDGYRGYPGDEGGPGERGPPGVNGTQGFQGCPGQRGVKGSRGFPGEKGEVGEIGLDGLDGEDGDKGLPGSSGEKGNPGRRGDKGPRGEKGERGDVGIRGDPGNPGQDSQERGPKGETGDLGPMGVPGRDGVPGGPGETGKNGGFGRRGPPGAKGNKGGPGQPGFEGEQGTRGAQGPAGPAGPPGLIGEQGISGPRGSGGARGAPGERGRTGPLGRKGEPGEPGPKGGIGNPGPRGETGDDGRDGVGSEGRRGKKGERGFPGYPGPKGNPGEPGLNGTTGPKGIRGRRGNSGPPGIVGQKGRPGYPGPAGPRGNRGDSIDQCALIQSIKDKCPCCYGPLECPVFPTELAFALDTSEGVNQDTFGRMRDVVLSIVNVLTIAESNCPTGARVAVVTYNNEVTTEIRFADSKRKSVLLDKIKNLQVALTSKQQSLETAMSFVARNTFKRVRNGFLMRKVAVFFSNTPTRASPQLREAVLKLSDAGITPLFLTRQEDRQLINALQINNTAVGHALVLPAGRDLTDFLENVLTCHVCLDICNIDPSCGFGSWRPSFRDRRAAGSDVDIDMAFILDSAETTTLFQFNEMKKYIAYLVRQLDMSPDPKASQHFARVAVVQHAPSESVDNASMPPVKVEFSLTDYGSKEKLVDFLSRGMTQLQGTRALGSAIEYTIENVFESAPNPRDLKIVVLMLTGEVPEQQLEEAQRVILQAKCKGYFFVVLGIGRKVNIKEVYTFASEPNDVFFKLVDKSTELNEEPLMRFGRLLPSFVSSENAFYLSPDIRKQCDWFQGDQPTKNLVKFGHKQVNVPNNVTSSPTSNPVTTTKPVTTTKPVTTTTKPVTTTTKPVTIINQPSVKPAAAKPAPAKPVAAKPVATKTATVRPPVAVKPATAAKPVAAKPAAVRPPAAAAKPVATKPEVPRPQAAKPAATKPATTKPVVKMLREVQVFEITENSAKLHWERPEPPGPYFYDLTVTSAHDQSLVLKQNLTVTDRVIGGLLAGQTYHVAVVCYLRSQVRATYHGSFSTKKSQPPPPQPARSASSSTINLMVSTEPLALTETDICKLPKDEGTCRDFILKWYYDPNTKSCARFWYGGCGGNENKFGSQKECEKVCAPVLAKPGVISVMGT

SEQ ID NO: 54 - protein, 2977 aa, Homo sapiens
MRKHRHLPLVAVFCLFLSGFPTTHAQQQQADVKNGAAADIIFLVDSSWTIGEEHFQLVREFLYDVVKSLAVGENDFHFALVQFNGNPHTEFLLNTYRTKQEVLSHISNMSYIGGTNQTGKGLEYIMQSHLTKAAGSRAGDGVPQVIVVLTDGHSKDGLALPSAELKSADVNVFAIGVEDADEGALKEIASEPLNMHMFNLENFTSLHDIVGNLVSCVHSSVSPERAGDTETLKDITAQDSADIIFLIDGSNNTGSVNFAVILDFLVNLLEKLPIGTQQIRVGVVQFSDEPRTMFSLDTYSTKAQVLGAVKALGFAGGELANIGLALDFVVENHFTRAGGSRVEEGVPQVLVLISAGPSSDEIRYGVVALKQASVFSFGLGAQAASRAELQHIATDDNLVFTVPEFRSFGDLQEKLLPYIVGVAQRHIVLKPPTIVTQVIEVNKRDIVFLVDGSSALGLANFNAIRDFIAKVIQRLEIGQDLIQVAVAQYADTVRPEFYFNTHPTKREVITAVRKMKPLDGSALYTGSALDFVRNNLFTSSAGYRAAEGIPKLLVLITGGKSLDEISQPAQELKRSSIMAFAIGNKGADQAELEEIAFDSSLVFIPAEFRAAPLQGMLPGLLAPLRTLSGTPEESKRDILFLFDGSANLVGQFPVVRDFLYKIIDELNVKPEGTRIAVAQYSDDVKVESRFDEHQSKPEILNLVKRMKIKTGKALNLGYALDYAQRYIFVKSAGSRIEDGVLQFLVLLVAGRSSDRVDGPASNLKQSGVVPFIFQAKNADPAELEQIVLSPAFILAAESLPKIGDLHPQIVNLLKSVHNGAPAPVSGEKDVVFLLDGSEGVRSGFPLLKEFVQRVVESLDVGQDRVRVAVVQYSDRTRPEFYLNSYMNKQDVVNAVRQLTLLGGPTPNTGAALEFVLRNILVSSAGSRITEGVPQLLIVLTADRSGDDVRNPSVVVKRGGAVPIGIGIGNADITEMQTISFIPDFAVAIPTFRQLGTVQQVISERVTQLTREELSRLQPVLQPLPSPGVGGKRDVVFLIDGSQSAGPEFQYVRTLIERLVDYLDVGFDTTRVAVIQFSDDPKVEFLLNAHSSKDEVQNAVQRLRPKGGRQINVGNALEYVSRNIFKRPLGSRIEEGVPQFLVLISSGKSDDEVDDPAVELKQFGVAPFTIARNADQEELVKISLSPEYVFSVSTFRELPSLEQKLLTPITTLTSEQIQKLLASTRYPPPAVESDAADIVFLIDSSEGVRPDGFAHIRDFVSRIVRRLNIGPSKVRVGVVQFSNDVFPEFYLKTYRSQAPVLDAIRRLRLRGGSPLNTGKALEFVARNLFVKSAGSRIEDGVPQHLVLVLGGKSQDDVSRFAQVIRSSGIVSLGVGDRNIDRTELQTITNDPRLVFTVREFRELPNIEERIMNSFGPSAATPAPPGVDTPPPSRPEKKKADIVFLLDGSINFRRDSFQEVLRFVSEIVDTVYEDGDSIQVGLVQYNSDPTDEFFLKDFSTKRQIIDAINKVVYKGGRHANTKVGLEHLRVNHFVPEAGSRLDQRVPQIAFVITGGKSVEDAQDVSLALTQRGVKVFAVGVRNIDSEEVGKIASNSATAFRVGNVQELSELSEQVLETLHDAMHETLCPGVTDAAKACNLDVILGFDGSRDQNVFVAQKGFESKVDAILNRISQMHRVSCSGGRSPTVRVSVVANTPSGPVEAFDFDEYQPEMLEKFRNMRSQHPYVLTEDTLKVYLNKFRQSSPDSVKVVIHFTDGADGDLADLHRASENLRQEGVRALILVGLERVVNLERLMHLEFGRGFMYDRPLRLNLLDLDYELAEQLDNIAEKACCGVPCKCSGQRGDRGPIGSIGPKGIPGEDGYRGYPGDEGGPGERGPPGVNGTQGFQGCPGQRGVKGSRGFPGEKGEVGEIGLDGLDGEDGDKGLPGSSGEKGNPGRRGDKGPRGEKGERGDVGIRGDPGNPGQDSQERGPKGETGDLGPMGVPGRDGVPGGPGETGKNGGFGRRGPPGAKGNKGGPGQPGFEGEQGTRGAQGPAGPAGPPGLIGEQGISGPRGSGGAAGAPGERGRTGPLGRKGEPGEPGPKGGIGNRGPRGETGDDGRDGVGSEGRRGKKGERGFPGYPGPKGNPGEPGLNGTTGPKGIRGRRGNSGPPGIVGQKGDPGYPGPAGPKGNRGDSIDQCALIQSIKDKCPCCYGPLECPVFPTELAFALDTSEGVNQDTFGRMRDVVLSIVNDLTIAESNCPRGARVAVVTYNNEVTTEIRFADSKRKSVLLDKIKNLQVALTSKQQSLETAMSFVARNTFKRVRNGFLMRKVAVFFSNTPTRASPQLREAVLKLSDAGITPLFLTRQEDRQLINALQINNTAVGHALVLPAGRDLTDFLENVLTCHVCLDICNIDPSCGFGSWRPSFRDRRAAGSDVDIDMAFILDSAETTTLFQFNEMKKYIAYLVRQLDMSPDPKASQHFARVAVVQHAPSESVDNASMPPVKVEFSLTDYGSKEKLVDFLSRGMTQLQGTRALGSAIEYTIENVFESAPNPRDLKIVVLMLTGEVPEQQLEEAQRVILQAKCKGYFFVVLGIGRKVNIKEVYTFASEPNDVFFKLVDKSTELNEEPLMRFGRLLPSFVSSENAFYLSPDIRKQCDWFQGDQPTKNLVKFGHKQVNVPNNVTSSPTSNPVTTTKPVTTTKPVTTTTKPVTTTTKPVTIINQPSVKPAAAKPAPAKPVAAKPVATKMATVRPPVAVKPATAAKPVAAKPAAVRPPAAAAAKPVATKPEVPRPQAAKPAATKPATTKPMVKMSREVQVFEITENSAKLHWERAEPPGPYFYDLTVTSAHDQSLVLKQNLTVTDRVIGGLLAGQTYHVAVVCYLRSQVRATYHGSFSTKKSQPPPPQPARSASSSTINLMVSTEPLALTETDICKLPKDEGTCRDFILKWYYDPNTKSCARFWYGGCGGNENKFGSQKECEKVCAPVLAKPGVISVMGT

SEQ ID NO: 55 - protein, 291 aa, Homo sapiens [sequence omitted]

SEQ ID NO: 56 - protein, 504 aa, Homo sapiens
MPTVEELYRNYGILADATEQVGQHKDAYQVILDGVKGGTKEKRLAAQFIPKFFKHFPELADSAINAQLDLCEDEDVSIRRQAIKELPQFATGENLPRVADILTQLLQTDDSAEFNLVNNALLSIFKMDAKGTLGGLFSQILQGEDIVRERAIKFLSTKLKTLPDEVLTKEVEELILTESKKVLEDVTGEEFVLFMKILSGLKSLQTVSGRQQLVELVAEQADLEQTFNPSDPDCVDRLLQCTRQAVPLFSKNVHSTRFVTYFCEQVLPNLGTLTTPVEGLDIQLEVLKLLAEMSSFCGDMEKLETNLRKLFDKLLEYMPLPPEEAENGENAGNEEPKLQFSYVECLLYSFHQLGRKLPDFLTAKLNAEKLKDFKIRLQYFARGLQVYIRQLRLALQGKTGEALKTEENKIKVVALKITNNINVLIKDLFHIPPSYKSTVTLSWKPVQKVEIGQKRASEDTTSGSPPKKSSAGPKRDARQIYNPPSGKYSSNLGNFNYERSLQGK

SEQ ID NO: 57 - protein, 280 aa, Homo sapiens
QNYLFGCELKADKDYHFKVDNDENEHQLSLRTVSLGAGAKDELHIVEAEAMNYEGSPIKVTLATLKMSVQPTVSLGGFEITPPVVLRLKCGSGPVHISGQHLVAVEEDAESEDEEEEDVKLLSISGKRSAPGGGSKVPQKKVKLAADEDDDDDDEEDDDEDDDDDDFDDEEAEEKAPVKKSIRDTPAKNAQKSNQNGKDSKPSSTPRSKGQESFKKQEKTPKTPKGPSSVEDIKAKMQASIEKGGSLPKVEAKFINYVKNCFRMTDQEAIQDLWQWRKSL

SEQ ID NO: 58 - protein, 241 aa, Homo sapiens
GGVKVERQVFGEATKQPGITFIAAKFDGILGMAYPRISVNNVLPVFDNLMQQKLVDQNIFSFYLSRDPDAQPGGELMLGGTDSKYYKGSLSYLNVTRKAYWQVHLDQVEVASGLTLCKEGCEAIVDTGTSLMVGPVDEVRELQKAIGAVPLIQGEYMIPCEKVSTLPAITLKLGGKGYKLSPEDYTLKVSQAGKTLCLSGFMGMDIPPPSGPLWILGDVFIGRYYTVFDRDNNRVGFAEAA

SEQ ID NO: 59 - protein, 76 aa, Homo sapiens
  MOD_RES (50): variable amino acid
  MOD_RES (67): variable amino acid
MQIFVKTLTGKTITLEVEPSDTIENVKAKIQDKEGIPPDQQRLIFAGKQXEDGRTLSDYNIQKESTXHLVLRLRGG

SEQ ID NO: 60 - protein, 1464 aa, Homo sapiens
MFSFVDLRLLLLLAATALLTHGQEEGQVEGQDEDIPPITCVQNGLRYHDRDVWKPEPCRICVCDNGKVLCDDVICDETKNCPGAEVPEGECCPVCPDGSESPTDQETTGVEGPKGDTGPRGPRGPAGPPGRDGIPGQPGLPGPPGPPGPPGPPGLGGNFAPQLSYGYDEKSTGGISVPGPMGPSGPRGLPGPPGAPGPQGFQGPPGEPGEPGASGPMGPRGPPGPPGKNGDDGEAGKPGRPGERGPPGPQGARGLPGTAGLPGMKGHRGFSGLDGAKGDAGPAGPKGEPGSPGENGAPGQMGPRGLPGERGRPGAPGPAGARGNDGATGAAGPPGPTGPAGPPGFPGAVGAKGEAGPQGPRGSEGPQGVRGEPGPPGPAGAAGPAGNPGADGQPGAKGANGAPGIAGAPGFPGARGPSGPQGPGGPPGPKGNSGEPGAPGSKGDTGAKGEPGPVGVQGPPGPAGEEGKRGARGEPGPTGLPGPPGERGGPGSRGFPGADGVAGPKGPAGERGSPGPAGPKGSPGEAGRPGEAGLPGAKGLTGSPGSPGPDGKTGPPGPAGQDGRPGPPGPPGARGQAGVMGFPGPKGAAGEPGKAGERGVPGPPGAVGPAGKDGEAGAQGPPGPAGPAGERGEQGPAGSPGFQGLPGPAGPPGEAGKPGEQGVPGDLGAPGPSGARGERGFPGERGVQGPPGPAGPRGANGAPGNDGAKGDAGAPGAPGSQGAPGLQGMPGERGAAGLPGPKGDRGDAGPKGADGSPGKDGVRGLTGPIGPPGPAGAPGDKGESGPSGPAGPTGARGAPGDRGEPGPPGPAGFAGPPGADGQPGAKGEPGDAGAKGDAGPPGPAGPAGPPGPIGNVGAPGAKGARGSAGPPGATGFPGAAGRVGPPGPSGNAGPPGPPGPAGKEGGKGPRGETGPAGRPGEVGPPGPPGPAGEKGSPGADGPAGAPGTPGPQGIAGQRGVVGLPGQRGERGFPGLPGPSGEPGKQGPSGASGERGPPGPMGPPGLAGPPGESGREGAPGAEGSPGRDGSPGAKGDRGETGPAGPPGAPGAPGAPGPVGPAGKSGDRGETGPAGPAGPVGPAGARGPAGPQGPRGDKGETGEQGDRGIKGHRGFSGLQGPPGPPGSPGEQGPSGASGPAGPRGPPGSAGAPGKDGLNGLPGPIGPPGPRGRTGDAGPVGPPGPPGPPGPPGPPSAGFDFSFLPQPPQEKAHDGGRYYRADDANVVRDRDLEVDTTLKSLSQQIENIRSPEGSRKNPARTCRDLKMCHSDWKSGEYWIDPNQGCNLDAIKVFCNMETGETCVYPTQPSVAQKNWYISKNPKDKRHVWFGESMTDGFQFEYGGQGSDPADVAIQLTFLRLMSTEASQNITYHCKNSVAYMDQQTGNLKKALLLKGSNEIEIRAEGNSRFTYSVTVDGCTSHTGAWGKTVIEYKTTKTSRLPIIDVAPLDVGAPDQEFGFDVGPVCFL

SEQ ID NO: 61 - protein, 76 aa, Homo sapiens
  MOD_RES (1): variable amino acid
XQIFVKTLTGKTITLEVEPSDTIENVKAKIQDKEGIPPDQQRLIFAGKQLEDGRTLSDYNIQKESTLHLVLRLRGG

SEQ ID NO: 62 - protein, 2225 aa, Homo sapiens
MAALVLEDGSVLRGQPFGAAVSTAGEVVFQTGMVGYPEALTDPSYKAQILVLTYPLIGNYGIPPDEMDEFGLCKWFESSGIHVAALVVGECCPTPSHWSATRTLHEWLQQHGIPGLQGVDTRELTKKLREQGSLLGKLVQNGTEPSSLPFLDPNARPLVPEVSIKTPRVFNTGGAPRILALDCGLKYNQIRCLCQRGAEVTVVPWDHALDSQEYEGLFLSNGPGDPASYPSVVSTLSRVLSEPNPRPVFGICLGHQLLALAIGAKTYKMRYGNRGHNQPCLLVGSGRCFLTSQNHGFAVETDSLPADWAPLFTNANDGSNEGIVHNSLPFFSVQFHPEHQAGPSDMELLFDIFLETVKEATAGNPGGQTVRERLTERLCPPGIPTPGSGLPPPRKVLILGSGGLSIGQAGEFDYSGSQAIKALKEENIQTLLINPNIATVQTSQGLADKVYFLPITPHYVTQVIRNERPDGVLLTFGGQTALNCGVELTKAGVLARYGVRVLGTPVETIELTEDRRAFAARMAEIGEHVAPSEAANSLEQAQAAAERLGYPVLVRAAFALGGLGSGFASNREELSALVAPAFAHTSQVLVDKSLKGWKEIEYEVVRDAYGNCVTVCNMENLDPLGIHTGESIVVAPSQTLNDREYQLLRQTAIKVTQHLGIVGECNVQYALNPESEQYYIIEVNARLSRSSALASKATGYPLAYVAAKLALGIPLPELRNSVTGGTAAFEPSVDYCVVKIPRWDLSKFLRVSTKIGSCMKSVGEVMGIGRSFEEAFQKALRMVDENCVGFDHTVKPVSDMELETPTDKRIFVVAAALWAGYSVDRLYELTRIDRWFLHRMKRIIAHAQLLEQHRGQPLPPDLLQQAKCLGFSDKQIALAVLSTELAVRKLRQELGICPAVKQIDTVAAEWPAQTNYLYLTYWGTTHDLTFRTPHVLVLGSGVYRIGSSVEFDWCAVGCIQQLRKMGYKTIMVNYNPETVSTDYDMCDRLYFDEISFEVVMDIYELENPEGVILSMGGQLPNNMAMALHRQQCRVLGTSPEAIDSAENRFKFSRLLDTIGISQPQWRELSDLESARQFCQTVGYPCVVRPSYVLSGAAMNVAYTDGDLERFLSSAAAVSKEHPVVISKFIQEAKEIDVDAVASDGVVAAIAISEHVENAGVHSGDATLVTPPQDITAKTLERIKAIVHAVGQELQVTGPFNLQLIAKDDQLKVIECNVRVSRSFPFVSKTLGVDLVALATRVIMGEEVEPVGLMTGSGVVGVKVPQFSFSRLAGADVVLGVEMTSTGEVAGFGESRCEAYLKAMLSTGFKIPKKNILLTIGSYKNKSELLPTVRLLESLGYSLYASLGTADFYTEHGVKVTAVDWHFEEAVDGECPPQRSILEQLAEKNFELVINLSMRGAGGRRLSSFVTKGYRTRRLAADFSVPLIIDIKCTKLFVEALGQIGPAPPLKVHVDCMTSQKLVRLPGLIDVHVHLREPGGTHKEDFASGTAAALAGGITMVCAMPNTRPPIIDAPALALAQKLAEAGARCDFALFLGASSENAGTLGTVAGSAAGLKLYLNETFSELRLDSVVQWMEHFETWPSHLPIVAHAEQQTVAAVLMVAQLTQRSVHICHVARKEEILLIKAAKARGLPVTCEVAPHHLFLSHDDLERLGPGKGEVRPELGSRQDVEALWENMAVIDCFASDHAPHTLEEKCGSRPPPGFPGLETMLPLLLTAVSEGRLSLDDLLQRLHHNPRRIFHLPPQEDTYVEVDLEHEWTIPSHMPFSKAHWTPFEGQKVKGTVRRVVLRGEVAYIDGQVLVPPGYGQDVRKWPQGAVPQLPPSAPATSEMTTTPERPRRGIPGLPDGRFHLPPRIHRASDPGLPAEEPKEKSSRKVAEPELMGTPDGTCYPPPPVPRQASPQNLGTPGLLHPQTSPLLHSLVGQHILSVQQFTKDQMSHLFNVAHTLRMMVQKERSLDILKGKVMASMFYEVSTRTSSSFAAAMARLGGAVLSFSEATSSVQKGESLADSVQTMSCYADVVVLRHPQPGAVELAAKHCRRPVINAGDGVGEHPTQALLDIFTIREELGTVNGMTITMVGDLKHGRTVHSLACLLTQYRVSLRYVAPPSLRMPPTVRAFVASRGTKQEEFESIEEALPDTDVLYMTRIQKERFGSTQEYEACFGQFILTPHIMTRAKKKMVVMHPMPRVNEISVEVDSDPRAAYFRQAENGMYIRMALLATVLGRF

SEQ ID NO: 63 - protein, 195 aa, Homo sapiens
CGSCWAFGAVEAISDRICIHTNVSVEVSAEDLLTCCGSMCGDGCNGGYPAEAWNFWTRKGLVSGGLYESHVGCRPYSIPPCEHHVNGSRPPCTGEGDTPKCSKICEPGYSPTYKQDKHYGYDSYSVSNSEKDIMAEIYKNGPVEGAFSVYSDFLLYKSGVYQHVTGEMMGGHAIRILGWGVENGTPYWLVANSWN

SEQ ID NO: 64 - protein, 303 aa, Homo sapiens
MARRGPGWRPLLLLVLLAGAAQGGLYFRRGQTCYRPLRGDGLAPLGRTTYPRPHEYLSPADLPKSWDWRNVDGVNYASITRNQHIPQYCGSCWAHASTSAMADRINIKRKGAWPSTLLSVQNVIDCGNAGSCEGGNDLSVWDYAHQHGIPDETCNNYQAKDQECDKFNQCGTCNEFKECHAIRNYTLWRVGDYGSLSGREKMMAEIYANGPISCGIMATERLANYTGGIYAEYQDTTYINHVVSVAGWGISDGTEYWIVRNSWGEPWGERGWLRIVTSTYKDGKGARYNLAIEEHCTFGDPIV

SEQ ID NO: 65 - protein, 354 aa, Homo sapiens
MLPKTSGTRATSLGRPEEEEDELAHRCSSFMAPPVTDLGELRRRPGDMKTKMELLILETQAQVCQALAQVDGGANFSVDRWERKEGGGGISCVLQDGCVFEKAGVSISVVHGNLSEEAAKQMRSRGKVLKTKDGKLPFCAMGVSSVTHPKNPHAPTIHFNYRYFEVEEADGHKQWWFGGGCDLTPTYLNQEDAVHFHRTLKEACDQHGPDLYPKFKKWCDDYFFIAHRGERRGIGGIFFDDLDSPSKEEVFRFVQSCARAVVPSYIPLVKKHCDDSFTPQEKLWQQLRRGRYVEFNLLYDRGTKFGLFTPGSRIESILMSLPLTARWEYMHSPSENSKEAEILEVLRHPRDWVR

SEQ ID NO: 66 - protein, 433 aa, Homo sapiens [sequence omitted]

SEQ ID NO: 67 - protein, 976 aa, Homo sapiens
MELQAARACFALLWGCALAAAAAAQGKEVVLLDFAAAGGELGWLTHPYGKGWDLMQNIMNDMPIYMYSVCNVMSGDQDNWLRTNWVYRGEAERNNFELNFTVRDCNSFPGGASSCKETFNLYYAESDLDYGTNFQKRLFTKIDTIAPDEITVSSDFEARHVKLNVEERSVGPLTRKGFYLAFQDIGACVALLSVRVYYKKCPELLQGLAHFPETIAGSDAPSLATVAGTCVDHAVVPPGGEEPRMHCAVDGEWLVPIGQCLCQAGYEKVEDACQACSPGFFKFEASESPCLECPEHTLPSPEGATSCECEEGFFRAPQDPASMPCTRPPSAPHYLTAVGMGAKVELRWTPPQDSGGREDIVYSVTCEQCWPESGECGPCEASVRYSEPPHGLTRTSVTVSDLEPHMNYTFTVEARNGVSGLVTSRSFRTASVSINQTEPPKVRLEGRSTTSLSVSWSIPPPQQSRVWKYEVTYRKKGDSNSYNVRRTEGFSVTLDDLAPDTTYLVQVQALTQEGQGAGSKVHEFQTLSPEGSGNLAVIGGVAVGVVLLLVLAGVGFFIHRRRKNQRARQSPEDVYFSKSEQLKPLKTYVDPHTYEDPNQAVLKFTTEIHPSCVTRQKVIGAGEFGEVYKGMLKTSSGKKEVPVAIKTLKAGYTEKQRVDFLGEAGIMGQFSHHNIIRLEGVISKYKPMMIITEYMENGALDKFLREKDGEFSVLQLVGMLRGIAAGMKYLANMNYVHRDLAARNILVNSNLVCKVSDFGLSRVLEDDPEATYTTSGGKIPIRWTAPEAISYRKFTSASDVWSFGIVMWEVMTYGERPYWELSNHEVMKAINDGFRLPTPMDCPSAIYQLMMQCWQQERARRPKFADIVSILDKLIRAPDSLKTLADFDPRVSIRLPSTSGSEGVPFRTVSEWLESIKMQQYTEHFMAAGYTAIEKVVQMTNDDIKRIGVRLPGHQKRIAYSLLGLKDQVNTVGIPI

SEQ ID NO: 68 - protein, 529 aa, Homo sapiens [sequence omitted]

SEQ ID NO: 69 - protein, 439 aa, Homo sapiens
EDEDVSIRRQAIKELPQFATGENLPRVADILTQLLQTDDSAEFNLVNNALLSIFKMDAKGTLGGLFSQILQGEDIVRERAIKFLSTKLKTLPDEVLTKEVEELILTESKKVLEDVTGEEFVLFMKILSGLKSLQTVSGRQQLVELVAEQADLEQTFNPSDPDCVDRLLQCTRQAVPLFSKNVHSTRFVTYFCEQVLPNLGTLTTPVEGLDIQLEVLKLLAEMSSFCGDMEKLETNLRKLFDKLLEYMPLPPEEAENGENAGNEEPKLQFSYVECLLYSFHQLGRKLPDFLTAKLNAEKLKDFKIRLQYFARGLQVYIRQLRLALQGKTGEALKTEENKIKVVALKITNNINVLIKDLFHIPPSYKSTVTLSWKPVQKVEIGQKRASEDTTSGSPPKKSSAGPKRDARQIYNPPSGKYSSNLGNFNYGERFRLGTRNMRD

SEQ ID NO: 70 - protein, 417 aa, Homo sapiens
MEFVKCLGHPEEFYNLVRFRIGGKRKVMPKMDQDSLSSSLKTCYKYLNQTSRSFAAVIQALDGEMRNAVCIFYLVLRALDTLEDDMTISVEKKVPLLHNFHSFLYQPDWRFMESKEKDRQVLEDFPTISLEFRNLAEKYQTVIADICRRMGIGMAEFLDKHVTSEQEWDKYCHYVAGLVGIGLSRLFSASEFEDPLVGEDTERANSMGLFLQKTNIIRDYLEDQQGGREFWPQEVWSRYVKKLGDFAKPENIDLAVQCLNELITNALHHIPDVITYLSRLRNQSVFNFCAIPQVMAIATLAACYNNQQVFKGAVKIRKGQAVTLMMDATNMPAVKAIIYQYMEEIYHRIPDSDPSSSKTRQIISTIRTQNLPNCQLISRSHYSPIYLSFVMLLAALSWQYLATLSQVTEDYVQTGEH

SEQ ID NO: 71 - protein, 318 aa, Homo sapiens
GFSPRGGGFGGRGGFGDRGGRGGRGGFGGGRGRGGGFRGRGRGGGGGGGGGGGGGRGGGGFHSGGNRGRGRGGKRGNQSGKNVMVEPHRHEGVFICRGKEDALVTKNLVPGESVYGEKRVSISEGDDKIEYRAWNPFRSKLAAAILGGVDQIHIKPGAKVLYLGAASGTTVSHVSDIVGPDGLVYAVEFSHRSGRDLINLAKKRTNIIPVIEDARHPHKYRMLIAMVDVIFADVAQPDQTRIVALNAHTFLRNGGHFVISIKANCIDSTASAEAVFASEVKKMQQENMKPQEQLTLEPYERDHAVVVGVYRPPPKVKN

SEQ ID NO: 72 - protein, 562 aa, Homo sapiens
DFIDLTLSKTQRKTPTVIHKHYQIHRIRHFYMRKVKFTQQNYHDRLSQILTDFPKLDDIHPFYADLMNILYDKDHYKLALGQINIAKNLVDNVAKDYVRLMKYGDSLYRCKQLKRAALGRMCTIIKRQKQSLEYLEQVRQHLSRLPTIDPNTRTLLLCGYPNVGKSSFINKVTRADVDVQPYAFTTKSLFVGHMDYKYLRWQVVDTPGILDHPLEDRNTIEMQAITALAHLRAAVLYVMDLSEQCGHGLKEQLELFQNIRPLFINKPLIVVANKCDVKRITELSEEDQKIFTDLQAEGFPVIETSTLTEEGVIQVKTEACDRLLAHRVETKMKGNKVNEVLNRLHLAVPNKRDDKPMEVFVFVFLRQGFSVALEAVLELALIDQAGLKITEICLPLPPSAGTKGVHHHLPERPPFIPEGVVARRKRMEIVEPRKKRERDLELEMGDDYILDLQKYWDLMNSSEKYDKIPEIWEGHNVADYIDPAIMKAKQIREKKKLKILQSKEKNTQGPRMPRTAKKVQRADLENEMRSLGVDMDDKDNAHYAVQARRSRSVTRKRKREES

SEQ ID NO: 73 - protein, 245 aa, Homo sapiens
MAVRASFENNCEIGCFAKLTNTYCLVAIGGSENFYSVFEGELSDTIPVVHASIAGCRIIGRMCVGNRHGLLVPNNTTDQELQHIRNSLPDTVQIRRVEERLSALGNVTTCNDYVALVHPDLDRETEEILADVLKVEVFRQTVADQVLVGSYCVFSNQGGLVHPKTSIEDQDELSSLLQVPLVAGTVNRGSEVIAAGMVVNDWCAFCGLDTTSTELSVVESVFKLNEAQPSTIATSMRDSLIDSLT

SEQ ID NO: 74 - protein, 209 aa, Homo sapiens [sequence omitted]

SEQ ID NO: 75 - protein, 848 aa, Homo sapiens
MSKSFQQSSLSRDSQGHGRDLSAAGIGLLAAATQSLSMPASLGRMNQGTARLASLMNLGMSSSLNQQGAHSALSSASTSSHNLQSIFNIGSRGPLPLSSQHRGDADQASNILASFGLSARDLDELSRYPEDKITPENLPQILLQLKRRRTEEGPTLSYGRDGRSATREPPYRVPRDDWEEKRHFRRDSFDDRGPSLNPVLDYDHGSRSQESGYYDRMDYEDDRLRDGERCRDDSFFGETSHNYHKFDSEYERMGRGSGPLQERSLFEKKRGAPSSSNIVDVHWTLTERVIPICALYVIGQVILIRSGVNISMEQVTVVDASFFLKSTQNGILTMIQDTQWVIHSCCSSLQIQHQEFWDLHLPHFILGDQQLDQRNLGAGNGTCKDLDTCRKAEWKLSRVVHIMGFSTEEKTLRYQLLQLVEPFGVISNHLILNKINEAFIEMATTEDAQAAVDYYTTTPALVFGKPVRVHLSQKYKRIKKPEGKPDQKFDQKQELGRVIHLSNLPHSGYSDSAVLKLAEPYGKIKNYILMRMKSQAFIEMETREDAMAMVDHCLKKALWFQGRCVKVDLSEKCKKLVLRIPNRGIDLLKKDKSRKRSYSPDGKESPSDKKSKTDGSQKTESSTEGKEQEEKSGEDGEKDTKDDQTEQEPNMLLESEDELLVDEEEAAALLESGSSVGDETDLANLGDVASDGKKEPSDKAVKKDGSASAAAKKKLKKVDKIEELDQENEAALENGIKNEENTEPGAESSENADDPNKDTSENADGQSDENKDDYTIPDEYRIGPYQPNVPVGIDYVIPKTGFYCKLCSLFYTNEEVAKNTHCSSLPHYQKLKKFLNKLAEERRQKKET

SEQ ID NO: 76 - protein, 344 aa, Homo sapiens
MSALAARLLQPAHSCSLRLRPFHLAAVRNEAVVISGRKLAQQIKQEVRQEVEEWVASGNKRPHLSVILVGENPASHSYVLNKTRAAAVVGINSETIMKPASISEEELLNLINKLNNDDNVDGLLVQLPLPEHIDERRICNAVSPDKDVDGFHVINVGRMCLDQYSMLPATPWGVWEIIKRTGIPTLGKNVVVAGRSKNVGMPIAMLLHTDGAHERPGGDATVTISHRYTPKEQLKKHTILADIVISAAGIPNLITADMIKEGAAVIDVGINRVHDPVTAKPKLVGDVDFEGVRQKAGYITPVPGGVGPMTVAMLMKNTIIAAKKVLRLEEREVLKSKELGVATN

SEQ ID NO: 77 - protein, 707 aa, Homo sapiens
MVKLAKAGKNQGDPKKMAPPPKEVEEDSEDEEMSEDEEDDSSGEEVVIPQKKGKKAAATSAKKVVVSPTKKVAVATPAKKAAVTPGKKAAATPAKKTVTPAKAVTTPGKKGATPGKALVATPGKKGAAIPAKGAKNGKNAKKEDSDEEEDDDSEEDEEDDEDEDEDEDEIEPAAMKAAAAAPASEDEDDEDDEDDEDDDDDEEDDSEEEAMETTPAKGKKAAKVVPVKAKNVAEDEDEEEDDEDEDDDDDEDDEDDDDEDDEEEEEEEEEEPVKEAPGKRKKEMAKQKAAPEAKKQKVEGTEPTTAFNLFVGNLNFNKSAPELKTGISDVFAKNDLAVVDVRIGMTRKFGYVDFESAEDLEKALELTGLKVFGNEIKLEKPKGKDSKKERDARTLLAKNLPYKVTQDELKEVFEDAAEIRLVSKDGKSKGIAYIEFKTEADAEKTFEEKQGTEIDGRSISLYYTGEKGQNQDYRGGKNSTWSGESKTLVLSNLSYSATEETLQEVFEKATFIKVPQNQNGKSKGYAFIEFASFEDAKEALNSCNKREIEGRAIRLELQGPRGSPNARSQPSKTLFVKGLSEDTTEETLKESFDGSVRARIVTDRETGSSKGFGFVDFNSEEDAKEAMEDGEIDGNKVTLDWAKPKGEGGFGGRGGGRGGFGGRGGGRGGRGGFGGRGRGGFGGRGGFRGGRGGGGDHKPQGKKTKFE

SEQ ID NO: 78 - protein, 529 aa, Homo sapiens
MLVLFETSVGYAIFKVLNEKKLQEVDSLWKEFETPEKANKIVKLKHFEKFQDTAEALAAFTALMEGKINKQLKKVLKKIVKEAHEPLAVADAKLGGVIKEKLNLSCIHSPVVNELMRGIRSQMDGLIPGVEPREMAAMCLGLAHSLSRYRLKFSADKVDTMIVQAISLLDDLDKELNNYIMRCREWYGWHFPELGKIISDNLTYCKCLQKVGDRKNYASAKLSELLPEEVEAEVKAAAEISMGTEVSEEDICNILHLCTQVIEISEYRTQLYEYLQNRMMAIAPNVTVMVGELVGARLIAHAGSLLNLAKHAASTVQILGAEKALFRALKSRRDTPKYGLIYHASLVGQTSPKHKGKISRMLAAKTVLAIRYDAFGEDSSSAMGVENRAKLEARLRTLEDRGIRKISGTGKALAKTEKYEHKSEVKTYDPSGDSTLPTCSKKRKIEQVDKEDEITEKKAKKAKIKVKVEEEEEEKVAEEEETSVKKKKKRGKKKHIKEEPLSEEEPCTSTAIASPEKKKKKKKKRENED

SEQ ID NO: 79 - protein, 836 aa, Homo sapiens
MIPFLPMFSLLLLLIVNPINANNHYDKILAHSRIRGRDQGPNVCALQQILGTKKKYFSTCKNWYKKSICGQKTTVLYECCPGYMRMEGMKGCPAVLPIDHVYGTLGIVGATTTQRYSDASKLREEIEGKGSFTYFAPSNEAWDNLDSDIRRGLESNVNVELLNALHSHMINKRMLTKDLKNGMIIPSMYNNLGLFINHYPNGVVTVNCARIIHGNQIATNGVVHVIDRVLTQIGTSIQDFIEAEDDLSSFRAAAITSDILEALGRDGHFTLFAPTNEAFEKLPRGVLERFMGDKVASEALMKYHILNTLQCSESIMGGAVFETLEGNTIEIGCDGDSITVNGIKMVNKKDIVTNNGVIHLIDQVLIPDSAKQVIELAGKQQTTFTDLVAQLGLASALRPDGEYTLLAPVNNAFSDDTLSMVQRLLKLILQNHILKVKVGLNELYNGQILETIGGKQLRVFVYRTAVCIENSCMEKGSKQGRNGAIHIFREIIKPAEKSLHEKLKQDKRFSTFLSLLEAADLKELLTQPGDWTLFVPTNDAFKGMTSEEKEILIRDKNALQNIILYHLTPGVFIGKGFEPGVTNILKTTQGSKIFLKEVNDTLLVNELKSKESDIMTTNGVIHVVDKLLYPADTPVGNDQLLEILNKLIKYIQIKFVRGSTFKEIPVTVYTTKIITKVVEPKIKVIEGSLQPIIKTEGPTLTKVKIEGEPEFRLIKEGETITEVIHGEPIIKKYTKIIDGVPVEITEKETREERIITGPEIKYTRISTGGGETEETLKKLLQEEVTKVTKFIEGGDGHLFEDEEIKRLLQGDTPVRKLQANKKVQGSRRRLREGRSQ

SEQ ID NO: 80 - protein, 999 aa, Homo sapiens
MADKVRRQRPRRRVCWALVAVLLADLLALSDTLAVMSVDLGSESMKVAIVKPGVPMEIVLNKESRRKTPVIVTLKENERFFGDSAASMAIKNPKATLRYFQHLLGKQADNPHVALYQARFPEHELTFDPQRQTVHFQISSQLQFSPEEVLGMVLNYSRSLAEDFAEQPIKDAVITVPVFFNQAERRAVLQAARMAGLKVLQLINDNTATALSYGVFRRKDINTTAQNIMFYDMGSGSTVCTIVTYQMVKTKEAGMQPQLQIRGVGFDRTLGGLEMELRLRERLAGLFNEQRKGQRAKDVRENPRAMAKLLREANRLKTVLSANADHMAQIEGLMDDVDFKAKVTRVEFEELCADLFERVPGPVQQALQSAEMSLDEIEQVILVGGATRVPRVQEVLLKAVGKEELGKNINADEAAAMGAVYQAAALSKAFKVKPFVVRDAVVYPILVEFTREVEEEPGIHSLKHNKRVLFSRMGPYPQRKVITFNRYSHDFNFHINYGDLGFLGPEDLRVFGSQNLTTVKLKGVGDSFKKYPDYESKGIKAHFNLDESGVLSLDRVESVFETLVEDSAEEESTLTKLGNTISSLFGGGTTPDAKENGTDTVQEEEESPAEGSKDEPGEQVELKEEAEAPVEDGSQPPPPEPKGDATPEGEKATEKENGDKSEAQKPSEKAEAGPEGVAPAPEGEKKQKPARKRRMVEEIGVELVVLDLPDLPEDKLAQSVQKLQDLTLRDLEKQEREKAANSLEAFIFETQDKLYQPEYQEVSTEEQREEISGKLSAASTWLEDEGVGATTVMLKEKLAELRKLCQGLFFRVEERKKWPERLSALDNLLNHSSMFLKGARLIPEMDQIFTEVEMTTLEKVINETWAWKNATLAEQAKLPATEKPVLLSKDIEAKMMALDREVQYLLNKAKFTKPRPRPKDKNGTRAEPPLNASASDQGEKVIPPAGQTEDAEPISEPEKVETGSEPGDTEPLELGGPGAEPEQKEQSTGQKRPLKNDEL

SEQ ID NO: 81 - protein, 265 aa, Homo sapiens
AGFKTVEPLEYYRRFLKENCRPDGRELGEFRTTTVNIGSISTADGSALVKLGNTTVICGVKAEFAAPSTDAPDKGYVVPNVDLPPLCSSRFRSGPPGEEAQVASQFIADVIENSQIIQKEDLCISPGKLVWVLYCDLICLDYDGNILDACTFALLAALKNVQLPEVTINEETALAEVNLKKKSYLNIRTHPVATSFAVFDDTLLIVDPTGEEEHLATGTLTIVMDEEGKLCCLHKPGGSGLTGAKLQDCMSRAVTRHKEVKKTDG

SEQ ID NO: 82 - protein, 509 aa, Homo sapiens
SPASPASPAMAWAALLGLLAALLLLLLLSRRRTRRPGEPPLDLGSIPWLGYALDFGKDAASFLTRMKEKHGDIFTILVGGRYVTVLLDPHSYDAVVWEPRTRLDFHAYAIFLMERIFDVQLPHYSPSDEKARMKLTLLHRELQALTEAMYTNLHAVLLGDATEAGSGWHEMGLLDFSYSFLLRAGYLTLYGIEALPRTHESQAQDRVHSADVFHTFRQLDRLLPKLARGSLSVGDKDHMCSVKSRLWKLLSPARLARRAHRSKWLESYLLHLEEMGVSEEMQARALVLQLWATQGNMGPAAFWLLLFLLKNPEALAAVRGELESILWQAEQPVSQTTTLPQKVLDSTPVLDSVLSESLRLTAAPFITREVVVDLAMPMADGREFNLRRGDRLLLFPFLSPQRDPEIYTDPEVFKYNRFLNPDGSEKKDFYKDGKRLKNYNMPWGAGHNHCLGRSYAVNSIKQFVFLVLVHLDLELINADVEIPEFDLSRYGFGLMQPEHDVPVRYRIRP

SEQ ID NO: 83 - protein, 1312 aa, Homo sapiens
MSRIEKMSILGVRSFGIEDKDKQIITFFSPLTILVGPNGAGKTTIIECLKYICTGDFPPGTKGNTFVHDPKVAQETDVRAQIRLQFRDVNGELIAVQRSMVCTQKSKKTEFKTLEGVITRTKHGEKVSLSSKCAEIDREMISSLGVSKAVLNNVIFCHQEDSNWPLSEGKALKQKFDEIFSATRYIKALETLRQVRQTQGQKVKEYQMELKYLKQYKEKACEIRDQITSKEAQLTSSKEIVKSYENELDPLKNRLKEIEHNLSKIMKLDNEIKALDSRKKQMEKDNSELEEKMEKVFQGTDEQLNDLYHNHQRTVREKERKLVDCHRELEKLNKESRLLNQEKSELLVEQGRLQLQADRHQEHIRARDSLIQSLATQLELDGFERGPFSERQIKNFHKLVRERQEGEAKTANQLMNDFAEKETLKQKQIDEIRDKKTGLGRIIELKSEILSKKQNELKNVKYELQQLEGSSDRILELDQELIKAERELSKAEKNSNVETLKMEVISLQNEKADLDRTLRKLDQEMEQLNHHTTTRTQMEMLTKDKADKDEQIRKIKSRHSDELTSLLGYFPNKKQLEDWLHSKSKEINQTRDRLAKLNKELASSEQNKNHINNELKRKEEQLSSYEDKLFDVCGSQDFESDLDRLKEEIEKSSKQRAMLAGATAVYSQFITQLTDENQSCCPVCQRVFQTEAELQEVISDLQSKLRLAPDKLKSTESELKKKEKRRDEMLGLVPMRQSIIDLKEKEIPELRNKLQNVNRDIQRLKNDIEEQETLLGTIMPEEESAKVCLTDVTIMERFQMELKDVERKIAQQAAKLQGIDLDRTVQQVNQEKQEKQHKLDTVSSKIELNRKLIQDQQEQIQHLKSTTNELKSEKLQISTNLQRRQQLEEQTVELSTEVQSLYREIKDAKEQVSPLETTLEKFQQEKEELINKKNTSNKIAQDKLNDIKEKVKNIHGYMKDIENYIQDGKDDYKKQKETELNKVIAQLSECEKHKEKINEDMRLMRQDIDTQKIQERWLQDNLTLRKRNEELKEVEEERKQHLKEMGQMQVLQMKSEHQKLEENIDNIKRNHNLALGRQKGYEEEIIHFKKELREPQFRDAEEKYREMMIVMRTTELVNKDLDIYYKTLDQAIMKFHSMKMEEINKIIRDLWRSTYRGQDIEYIEIRSDADENVSASDKRRNYNYRVVMLKGDTALDMRGRCSAGQKVLASLIIRLALAETFCLNCGIIALDEPTTNLDRENIESLAHALVEIIKSRSQQRNFQLLVITHDEDFVELLGRSEYVEKFYRIKKNIDQCSEIVKCSVSSLGFNVH

SEQ ID NO: 84 - protein, 2115 aa, Homo sapiens
MTLHATRGAALLSWVNSLHVADPVEAVLQLQDCSIFIKIIDRIHGTEEGQQILKQPVSERLDFVCSFLQKNRKHPSSPECLVSAQKVLEGSELELAKMTMLLLYHSTMSSKSPRDWEQFEYKIPAELAVILKFVLDHEDGLNLNEDLENFLQKAPVPSTCSSTFPEELSPPSHQAKREIRFLELQKVASSSSGNNFLSGSPASPMGDILQTPQFQMRRLKKQLADERSNRDELELELAENRKLLTEKDAQIAMMQQRIDRLALLNEKQAASPLEPKELEELRDKNESLTMRLHETLKQCQDLKTEKSQMDRKINQLSEENGDLSFKLREFASHLQQLQDALNELTEEHSKATQEWLEKQAQLEKELSAALQDKKCLEEKNEILQGKLSQLEEHLSQLQDNPPQEKGEVLGDVLQLETLKQEAATLAANNTQLQARVEMLETERGQQEAKLLAERGHFEEEKQQLSSLITDLQSSISNLSQAKEELEQASQAHGARLTAQVASLTSELTTLNATIQQQDQELAGLKQQAKEKQAQLAQTLQQQEQASQGLRHQVEQLSSSLKQKEQQLKEVAEKQEATRQDHAQQLATAAEEREASLRERDAALKQLEALEKEKAAKLEILQQQLQVANEARDSAQTSVTQAQREKAELSRKVEELQACVETARQEQHEAQAQVAELELQLRSEQQKATEKERVAQEKDQLQEQLQALKESLKVTKGSLEEEKRRAADALEEQQRCISELKAETRSLVEQHKRERKELEEERAGRKGLEARLQQLGEAHQAETEVLRRELAEAMAAQHTAESECEQLVKEVAAWRERYEDSQQEEAQYGAMFQEQLMTLKEECEKARQELQEAKEKVAGIESHSELQISRQQNELAELHANLARALQQVQEKEVRAQKLADDLSTLQEKMAATSKEVARLETLVRKAGEQQETASRELVKEPARAGDRQPEWLEEQQGRQFCSTQAALQAMEREAEQMGNELERLRAALMESQGQQQEERGQQEREVARLTQERGRAQADLALEKAARAELEMRLQNALNEQRVEFATLQEALAHALTEKEGKDQELAKLRGLEAAQIKELEELRQTVKQLKEQLAKKEKEHASGSGAQSEAAGRTEPTGPKLEALRAEVSKLEQQCQKQQEQADSLERSLEAERASRAERDSALETLQGQLEEKAQELGHSQSALASAQRELAAFRTKVQDHSKAEDEWKAQVARGRQEAERKNSLISSLEEEVSILNRQVLEKEGESKELKRLVMAESEKSQKLEERLRLLQAETASNSARAAERSSALREEVQSLREEAEKQRVASENLRQELTSQAERAEELGQELKAWQEKFFQKEQALSTLQLEHTSTQALVSELLPAKHLCQQLQAEQAAAEKRHREELEQSKQAAGGLRAELLRAQRELGELIPLRQKVAEQERTAQQLRAEKASYAEQLSMLKKAHGLLAEENRGLGERANLGRQFLEVELDQAREKYVQELAAVRADAETRLAEVQREAQSTARELEVMTAKYEGAKVKVLEERQRFQEERQKLTAQVEQLEVFQREQTKQVEELSKKLADSDQASKVQQQKLKAVQAQGGESQQEAHRLQAQLNELQAQLSQKEQAAEHYKLQMEKAKTHYDAKKQQNQELQEQLRSLEQLQKENKELRAEAERLGHELQQAGLKTKEAEQTCRHLTAQVRSLEAQVAHADQQLRDLGKFQVATDALKSREPQAKPQLDLSIDSLDLSCEEGTPLSITSKLPRTQPDGTSVPGEPASPISQRLPPKVESLESLYFTPIPARSQAPLESSLDSLGDVFQDSGRKTRSARRRTTQIINITMTKKLDVEEPDSANSSFYSTRSAPASQASLRATSSTQSLARLGSPDYGNSALLSLPGYRPTTRSSARRSQAGVSSGAPPGRNSFYMGTCQDEPEQLDDWNRIAELQQRNRVCPPHLKTCYPLESRPSLSLGTITDEEMKTGDPQETLRRASMQPIQIAEGTGITTRQQRKRVSLEPHQGPGTPESKKATSCFPRPMTPRDRHEGRKQSTTEAQKKAAPASTKQADRRQSMAFSILNTPKKLGNSLLRRGASKKALSKASPNTRSGTRRSPRIATTTASAATAAAIGATPRAKGKAKH

SEQ ID NO: 85 - protein, 1052 aa, Homo sapiens
MSSAAEPPPPPPPESAPSKPAASIASGGSNSSNKGGPEGVAAQAVASAASAGPADAEMEEIFDDASPGKQKEIQEPDPTYEEKMQTDRANRFEYLLKQTELFAHFIQPAAQKTPTSPLKMKPGRPRIKKDEKQNLLSVGDYRHRRTEQEEDEELLTESSKATNVCTRFEDSPSYVKWGKLRDYQVRGLNWLISLYENGINGILADEMGLGKTLQTISLLGYMKHYRNIPGPHMVLVPKSTLHNWMSEFKRWVPTLRSVCLIGDKEQRAAFVRDVLLPGEWDVCVTSYEMLIKEKSVFKKFNWRYLVIDEAHRIKNEKSKLSEIVREFKTTNRLLLTGTPLQNNLHELWSLLNFLLPDVFNSADDFDSWFDTNNCLGDQKLVERLHMVLRPFLLRRIKADVEKSLPPKKEVKIYVGLSKMQREWYTRILMKDIDILNSAGKMDKMRLLNILMQLRKCCNHPYLFDGAEPGPPYTTDMHLVTNSGKMVVLDKLLPKLKEQGSRVLIFSQMTRVLDILEDYCMWRNYEYCRLDGQTPHDERQDSINAYNEPNSTKFVFMLSTRAGGLGINLATADVVILYDSDWNPQVDLQAMDRAHRIGQTKTVRVFRFITDNTVEERIVERAEMKLRLDSIVIQQGRLVDQNLNKIGKDEMLQMIRHGATHVFASKESEITDEDIDGILERGAKKTAEMNEKLSKMGESSLRNFTMDTESSVYNFEGEDYREKQKIAFTEWIEPPKRERKANYAVDAYFREALRVSEPKAPKAPRPPKQPNVQDFQFFPPRLFELLEKEILFYRKTIGYKVPRNPELPNAAQAQKEEQLKIDEAESLNDEELEEKEKLLTQGFTNWNKRDFNQFIKANEKWGRDDIENIAREVEGKTPEEVIEYSAVFWERCNELQDIEKIMAQIERGEARIQRRISIKKALDTKIGRYKAPFHQLRISYGTNKGKNYTEEEDRFLICMLHKLGFDKENVYDELRQCIRNSPQFRFDWFLKSRTAMELQRRCNTLITLIERENMELEEKEKAEKKKRGPKPSTQKRKMDGAPDGRGRKKKLKL

SEQ ID NO: 86 - protein, 529 aa, Homo sapiens
MSQDTEVDMKEVELNELEPEKQPMNAASGAAMSLAGAEKNGLVKIKVAEDEAEAAAAAKFTGLSKEELLKVAGSPGWVRTRWALLLLFWLGWLGMLAGAVVIIVRAPRCRELPAQKWWHTGALYRIGDLQAFQGHGAGNLAGLKGRLDYLSSLKVKGLVLGPIHKNQKDDVAQTDLLQIDPNFGSKEDFDSLLQSAKKKSIRVILDLTPNYRGENSWFSTQVDTVATKVKDALEFWLQAGVDGFQVRDIENLKDASSFLAEWQNITKGFSEDRLLIAGTNSSDLQQILSLLESNKDLLLTSSYLSDSGSTGEHTKSLVTQYLNATGNRWCSWSLSQARLLTSFLPAQLLRLYQLMLFTLPGTPVFSYGDEIGLDAAALPGQPMEAPVMLWDESSFPDIPGAVSANMTVKGQSEDPGSLLSLFRRLSDQRSKERSLLHGDFHAFSAGPGLFSYIRHWDQNERFLVVLNFGDVGLSAGLQASDLPASASLPAKADLLLSTQPGREEGSPLELERLKLEPHEGLLLRFPYAA

SEQ ID NO: 87 - protein, 418 aa, Homo sapiens
MRSLLLLSAFCLLEAALAAEVKKPAAAAAPGTAEKLSPKAATLAERSAGLAFSLYQAMAKDQAVENILVSPVVVASSLGLVSLGGKATTASQAKAVLSAEQLRDEEVHAGLGELLRSLSNSTARNVTWKLGSRLYGPSSVSFADDFVRSSKQHYNCEHSKINFRDKRSALQSINEWAAQTTDGKLPEVTKDVERTDGALLVNAMFFKPHWDEKFHHKMVDNRGFMVTRSYTVGVMMMHRTGLYNYYDDEKEKLQIVEMPLAHKLSSLIILMPHHVEPLERLEKLLTKEQLKIWMGKMQKKAVAISLPKGVVEVTHDLQKHLAGLGLTEAIDKNKADLSRMSGKKDLYLASVFHATAFELDTDGNPFDQDIYGREELRSPKLFYADHPFIFLVRDTQSGSLLFIGRLVRPKGDKMRDEL

SEQ ID NO: 88 - protein, 864 aa, Homo sapiens
GNKSVLMERLKKAIEDEGGNPDEIEITSEGNKKTSKRSSKGRKPEEEGVEDNGLEENSGDGQEDVETSLENLQDIDIMDISVLDEAEIDNGSVADCVEDDDADNLQESLSDSRELVEGEMKELPEQLQEHAIEDKETINNLDTSSSDFTILQEIEEPSLEPENEKILDILGETCKSEPVKEESSELEQPFAQDTSSVGPDRKLAEEEDLFDSAHPEEGDLDLASESTAHAQSSKADSLLAVVKREPAEQPGDGERTDCEPVGLEPAVEQSSAASELAEASSEELAEAPTEAPSPEARDSKEDGRKFDFDACNEVPPAPKESSTSEGADQKMSSPEDDSDTKRLSKEEKGRSSCGRNFWVSGLSSTTRATDLKNLFSKYGKVVGAKVVTNARSPGARCYGFVTMSTAEEATKCINHLHKTELHGKMISVEKAKNEPVGKKTSDKRDSDGKKEKSSNSDRSTNLKRDDKCDRKDDAKKGDDGSGEKSKDQDDQKPGPSERSRATKSGSRGTERTVVMDKSKGVPVISVKTSGSKERASKSQDRKSASREKRSVVSFDKVKEPRKSRDSESHSRVRERSEREQRMQAQWEREERERLEIARERLAFQRQRLERERMERERLERERMHVEHERRREQERIHREREELRRQQELRYEQERRPAVRRPYDLDRRDDAYWPEAKRAGLDERYHSDFNRQERFHDFDHRDRGRYPDHSVDRREGSRSMMGEREGQHYPERHGGPERHGRDSRDGWGGYGSDKRMSEGRGLPPPPRRDWGDHGRREDDRSWQGTADGGMMDRDHKRWQGGERSMSGHSGPGHMMNRGGMSGRGSFAPGGASRGHPIPHGGMQGGFGGQSRGSRPSDARFTRRY

SEQ ID NO: 89 - protein, 541 aa, Homo sapiens [sequence omitted]

SEQ ID NO: 90 - protein, 507 aa, Homo sapiens
MAGAGPKRRALAAPAAEEKEEAREKMLAAKSADGSAPAGEGEGVTLQRNITLLNGVAIIVGTIIGSGIFVTPTGVLKEAGSPGLALVVWAACGVFSIVGALCYAELGTTISKSGGDYAYMLEVYGSLPAFLKLWIELLIIRPSSQYIVALVFATYLLKPLFPTCPVPEEAAKLVACLCVLLLTAVNCYSVKAATRVQDAFAAAKLLALALIILLGFVQIGKGDVSNLDPNFSFEGTKLDVGNIVLALYSGLFAYGGWNYLNFVTEEMINPYRNLPLAIIISLPIVTLVYVLTNLAYFTTLSTEQMLSSEAVAVDFGNYHLGVMSWIIPVFVGLSCFGSVNGSLFTSSRLFFVGSREGHLPSILSMIHPQLLTPVPSLVFTCVMTLLYAFSKDIFSVINFFSFFNWLCVALAIIGMIWLRHRKPELERPIKVNLALPVFFILACLFLIAVSFWKTPVECGIGFTIILSGLPVYFFGVWWKNKPKWLLQGIFSTTVLCQKLMQVVPQET

SEQ ID NO: 91 - protein, 609 aa, Homo sapiens
MSGWESYYKTEGDEEAEEEQEENLEASGDYKYSGRDSLIFLVDASKAMFESQSEDELTPFDMSIQCIQSVYISKIISSDRDLLAVVFYGTEKDKNSVNFKNIYVLQELDNPGAKRILELDQFKGQQGQKRFQDMMGHGSDYSLSEVLWVCANLFSDVQFKMSHKRIMLFTNEDNPHGNDSAKASRARTKAGDLRDTGIFLDLMHLKKPGGFDISLFYRDIISIAEDEDLRVHFEESSKLEDLLRKVRAKETRKRALSRLKLKLNKDIVISVGIYNLVQKALKPPPIKLYRETNEPVKTKTRTFNTSTGGLLLPSDTKRSQIYGSRQIILEKEETEELKRFDDPGLMLMGFKPLVLLKKHHYLRPSLFVYPEESLVIGSSTLFSALLIKCLEKEVAALCRYTPRRNIPPYFVALVPQEEELDDQKIQVTPPGFQLVFLPFADDKRKMPFTEKIMATPEQVGKMKAIVEKLRFTYRSDSFENPVLQQHFRNLEALALDLMEPEQAVDLTLPKVEAMNKRLGSLVDEFKELVYPPDYNPEGKVTKRKHDNEGSGSKRPKVEYSEEELKTHISKGTLGKFTVPMLKEACRAYGLKSGLKKQELLEALTKHFQD

SEQ ID NO: 92 - protein, 760 aa, Homo sapiens
MMDQARSAFSNLFGGEPLSYTRFSLARQVDGDNSHVEMKLAVDEEENADNNTKANVTKPKRCSGSICYGTIAVIVFFLIGFMIGYLGYCKGVEPKTECERLAGTESPVREEPGEDFPAARRLYWDDLKRKLSEKLDSTDFTSTIKLLNENSYVPREAGSQKDENLALYVENQFREFKLSKVWRDQHFVKIQVKDSAQNSVIIVDKNGRLVYLVENPGGYVAYSKAATVTGKLVHANFGTKKDFEDLYTPVNGSIVIVRAGKITFAEKVANAESLNAIGVLIYMDQTKFPIVNAELSFFGHAHLGTGDPYTPGFPSFNHTQFPPSRSSGLPNIPVQTISRAAAEKLFGNMEGDCPSDWKTDSTCRMVTSESKNVKLTVSNVLKEIKILNIFGVIKGFVEPDHYVVVGAQRDAWGPGAAKSGVGTALLLKLAQMFSDMVLKDGFQPSRSIIFASWSAGDFGSVGATEWLEGYLSSLHLKAFTYINLDKAVLGTSNFKVSASPLLYTLIEKTMQNVKHPVTGQFLYQDSNWASKVEKLTLDNAAFPFLAYSGIPAVSFCFCEDTDYPYLGTTMDTYKELIERIPELNKVARAAAEVAGQFVIKLTHDVELNLDYERYNSQLLSFVRDLNQYRADIKEMGLSLQWLYSARGDFFRATSRLTTDFGNAEKTDRFVMKKLNDRVMRVEYHFLSPYVSPKESPFRHVFWGSGSHTLPALLENLKLRKQNNGAFNETLFRNQLALATWTIQGAANALSGDVWDIDNEF

SEQ ID NO: 93 - protein, 808 aa, Homo sapiens [sequence omitted]

SEQ ID NO: 94 - protein, 253 aa, Homo sapiens
MCNTPTYCDLGKAAKDVFNKGYGFGMVKIDLKTKSCSGVEFSTSGHAYTDTGKASGNLETKYKVCNYGLTFTQKWNTDNTLGTEISWENKLAEGLKLTLDTIFVPNTGKKSGKLKASYKRDCFSVGSNVDIDFSGPTIYGWAVLAFEGWLAGYQMSFDTAKSKLSQNNFALGYKAADFQLHTHVNDGTEFGGSIYQKVNEKIETSINLAWTAGSNNTRFGIAAKYMLDCRTSLSAKVNNASLIGLGYTQTLRP

SEQ ID NO: 95 - protein, 687 aa, Homo sapiens
MVKLAKAGKNQGDPKKMAPPPKEVEEDSEDEEMSEDEEDDSSGEEVVIPQKKGKKAAATSAKKVVVSPTKKVAVATPAKAVTTPGKKGATPGKALVATPGKKGAAIPAKGAKNGKNAKKEDSDEEEDDDSEEDEEDDEDEDEDEDEIEPAAMKAAAAAPASEDEDDEDDEDDEDDDDDEEDDSEEEAMETTPAKGKKAAKVVPVKAKNVAEDEDEEEDDEDEDDDDDEDDEDDDDEDDEEEEEEEEEEPVKEAPGKRKKEMAKQKAAPEAKKQKVEGTEPTTAFNLFVGNLNFNKSAPELKTGISDVFAKNDLAVVDVRIGMTRKFGYVDFESAEDLEKALELTGLKVFGNEIKLEKPKGKDSKKERDARTLLAKNLPYKVTQDELKEVFEDAAEIRLVSKDGKSKGIAYIEFKTEADAEKTFEEKQGTEIDGRSISLYYTGEKGQNQDYRGGKNSTWSGESKTLVLSNLSYSATEETLQEVFEKATFIKVPQNQNGKSKGYAFIEFASFEDAKEALNSCNKREIGGRAIRLELQGPRGSPNARSQPSKTLFVKGLSEDTTEETLKESFDGSVRARIVTDRETGSSKGFGFVDFNSEEDAKAAKEAMEDGEIDGNKVTLDWAKPKGEGGFGGRGGGRGGFGGRGGGRGGRGGFGGRGRGGFGGRGGFRGGRGGGGDHKPQGKKTKFE

SEQ ID NO: 96 - protein, 103 aa, Homo sapiens
  MOD_RES (38): variable amino acid
  MOD_RES (96): variable amino acid
MSGCGKGGKGLGKGGAKRHRKVLRDNIQGITKPAIRRXARRGGVKRISGLIYEETRGVLKVFLENVIRDAVTYTEHAKRKTVTAMDVVYALKRQGXTLYGFGG

SEQ ID NO: 97 - protein, 670 aa, Homo sapiens
MSHLPMKLLRKKIEKRNLKLRQRNLKFQGASNLTLSETQNGDVSEETMGSRKVKKSKQKPMNVGLSETQNGGMSQEAVGNIKVTKSPQKSTVLTNGEAAMQSSNSESKKKKKKKRKMVNDAEPDTKKAKTENKGKSEEESAETTKETENNVEKPDNDEDESEVPSLPLGLTGAFEDTSFASLCNLVNENTLKAIKEMGFTNMTEIQHKSIRPLLEGRDLLAAAKTGSGKTLAFLIPAVELIVKLRFMTRNGTGVLILSPTRELAMQTFGVLKELMTHHVHTYGLIMGGSNRSAEAQKLGNGINIIVATPGRLLDHMQNTPGFMYKNLQCLVIDEADRILDVGFEEELKQIIKLLPTRRQTMLFSATQTRKVEDLARISLKKEPLYVGVDDDKANATVDGLEQGYVVCPSEKRFLLLFTFLKKNRKKKLMVFFSSCMSVKYHYELLNYIDLPVLAIHGKQKQNKRTTTFFQFCNADSGTLLCTDVAARGLDIPEVDWIVQYDPPDDPKEYIHRVGRTARGLNGRGHALLILRPEELGFLRYLKQSKVPLSEFDFSWSKISDIQSQLEKLIEKNYFLHKSAQEAYKSYIRAYDSHSLKQIFNVNNLNLPQVALSFGFKVPPFVDLNVNSNEGKQKKRGGGGGFGYQKTKKVEKSKIFKHISKKSSDSRQFSH

SEQ ID NO: 98 - protein, 418 aa, Homo sapiens
MQRRDDPAARMSRSSGRSGSMDPSGAHPSVRQTPSRQPPPLLPPSATGPDATVGGPAPTPLLPPSATASVKMEPENKYLPELMAEKDSLDPSFTHAMQLLTAEIEKIQKGDSKKDDEENYLDLFSHKNMKLKERVLIPVKQYPKFNFVGKILGPQGNTIKRLQEETGAKISVLGKGSMRDKAKEEELRKGGDPKYAHLNMDLHVFIEVFGPPCEAYALMAHAMEEVKKFLVPDMMDDICQEQFLELSYLNGVPEPSRGRGVPVRGRGAAPPPPPVPRGRGVGPPRGALVRGTPVRGAITRGATVTRGVPPPPTVRGAPAPRARTAGIQRIPLPPPPAPETYEEYGYDDTYAEQSYEGYEGYYSQSQGDSEYYDYGHGEVQDSYEAYGQDDWNGTRPSLKAPPARPVKGAYREHPYGRY

SEQ ID NO: 99 - protein, 237 aa, Homo sapiens
MGLPPPPIPPPPPLSSSFGVPPPPPGIHYQHLMPPPPRLPPHLAVPPPGAIPPALHLNPAFFPPPNATVGPPPDTYMKASAPYNHHGSRDSGPPPSTVSEAEFEDIMKRNRAISSSAISKAVSGASAGDYSDAIETLLTAIAVIKQSRVANDDRCRVLISSLKDCLHGIEAKSYSVGASGSSSRKRHRSRERSPSRSRESSRRHRDLLHNEDRHDDYFQERNREHERHRDRERDRHH

SEQ ID NO: 100 - protein, 702 aa, Homo sapiens
METPSQRRATRSGAQASSTPLSPTRITRLQEKEDLQELNDRLAVYIDRVRSLETENAGLRLRITESEEVVSREVSGIKAAYEAELGDARKTLDSVAKERARLQLELSKVREEFKELKARNTKKEGDLIAAQARLKDLEALLNSKEAALSTALSEKRTLEGELHDLRGQVAKLEAALGEAKKQLQDEMLRRVDAENRLQTMKEELDFQKNIYSEELRETKRRHETRLVEIDNGKQREFESRLADALQELRAQHEDQVEQYKKELEKTYSAKLDNARQSAERNSNLVGAAHEELQQSRIRIDSLSAQLSQLQKQLAAKEAKLRDLEDSLARERDTSRRLLAEKEREMAEMRARMQQQLDEYQELLDIKLALDMEIHAYRKLLEGEEERLRLSPSPTSQRSRGRASSHSSQTQGGGSVTKKRKLESTESRSSFSQHARTSGRVAVEEVDEEGKFVRLRNKSNEDQSMGNWQIKRQNGDDPLLTYRFPPKFTLKAGQVVTIWAAGAGATHSPPTDLVWKAQNTWGCGNSLRTALINSTGEEVAMRKLVRSVTVVEDDEDEDGDDLLHHHHGSHCSSSGDPAEYNLRLAHRAVRDLRAACRQGICQRLRSPGGRTHLLWLFCLQCHGHSQLPQCGGQWGWQLRGQSGHPLLPPGQLQPPNPEPPELQHHVIWDLPGRGGGGGFLRPPHLMPTPCPARHGRGLEAKEK

SEQ ID NO: 101 - protein, 322 aa, Homo sapiens
  MOD_RES (1): variable amino acid
  MOD_RES (7): variable amino acid
  MOD_RES (9): variable amino acid
  MOD_RES (13): variable amino acid
  MOD_RES (27): variable amino acid
XELRVRXTXPHSXRSDSEDICLFTKDXPNSTPEKTEQFYRKLLNKHGIKTVSQIISLQTLKKEYKSYEAKLRLLSSFDFFLTDARIRRLLPSLIGRHFYQRKKVPVSVNLLSKNLSREINDCIGGTVLNISKSGSCSAIRIGHVGMQIEHIIENIVAVTKGLSEKLPEKWESVKLLFVKTEKSAALPIFSSFVSNWDEATKRSLLNKKKKEARRKRRERNFEKQKERKKKRQQARKTASVLSKDDVAPESGDTTVKKPESKKEQTPEHGKKKRGRGKAQVKATNESEDEIPQLVPIGKKTPANEKVEIQKHATGKKSPGKES

SEQ ID NO: 102 - protein, 629 aa, Homo sapiens
DAWAAEPDASEKPAEATAGSGGVNGGEEQGLGKREEDEPEERSGDETPGSEVPGDKAAEEQGDDQDSEKSKPAGSDGERRGVKRQRDEKDEHGRAYYEFREEAYHSRSKSPLPPEEEAKDEEEDQTLVNLDTYTSDLHFQVSKDRYGGQPLFSEKFPTLWSGARSTYGVTKGKVCFEAKVTQNLPMKEGCTEVSLLRVGWSVDFSRPQLGEDEFSYGFDGRGLKAENGQFEEFGQTFGENDVIGCFANFETEEVELSFSKNGEDLGVAFWISKDSLADRALLPHVLCKNCVVELNFGQKEEPFFPPPEEFVFIHAVPVEERVRTAVPPKTIEECEVILMVGLPGSGKTQWALKYAKENPEKRYNVLGAETVLNQMRMKGLEEPEMDPKSRDLLVQQASQCLSKLVQIASRTKRNFILDQCNVYNSGQRRKLLLFKTFSRKVVVVVPNEEDWKKRLELRKEVEGDDVPESIMLEMKANFSLPEKCDYMDEVTYGELEKEEAQPIVTKYKEEARKLLPPSEKRTNRRNNRNKRNRQNRSRGQGYVGGQRRGYDNRAYGQQYWGQPGNRGGYRNFYDRYRGDYDRFYGRDYEYNRYRDYYRQYNRDWQSYYYHHPQDRDRYYRNYYGYQGYR

SEQ ID NO: 103 - protein, 401 aa, Homo sapiens
MASSPRPKMDAILTEAIKACFQKSGASVVAIRKYIIHKYPSLELERRGYLLKQALKRELNRGVIKQVKGKGASGSFVVVQKSRKTPQKSRNRKNRSSAVDPEPQVKLEDVLPLAFTRLCEPKEASYSLIRKYVSQYYPKLRVDIRPQLLKNALQRAVERGQLEQITGKGASGTFQLKKSGEKPLLGGSLMEYAILSAIAAMNEPKTCSTTALKKYVLENHPGTNSNYQMHLLKKTLQKCEKNGWMEQISGKGFSGTFQLCFPYYPSPGVLFPKKEPDDSRDEDEDEDESSEEDSEDEEPPPKRRLQKKTPAKSPGKAASVKQRGSKPAPKVSAAQRGKARPLPKKAPPKAKTPAKKTRPSSTVIKKPSGGSSKKPATSARKEVKLPGKGKSTMKKSFRVKK

SEQ ID NO: 104 - protein, 1255 aa, Homo sapiens
GRVGGVGRETARPCYSLALAQLLQSFEDLPLCSILQQIQEKYDLHQVKKAMLRPALFANLFGVLALFQSGRLVKDQEALMKSVKLLQALAQYQNHLQEQPRKALVDILSEVSKATLQEILPEVLKADLNIILSSPEQLELFLLAQQKVPSKLKKLVGSVNLFSDENVPRLVNVLKMAASSVKKDRKLPAIALDLLRLALKEDKFPRFWKEVVEQGLLKMQFWPASYLCFRLLGAALPLLTKEQLHLVMQGDVIRHYGEHVCTAKLPKQFKFAPEMDDYVGTFLEGCQDDPERQLAVLVAFSSVTNQGLPVTPTFWRVVRFLSPPALQGYVAWLRAMFLQPDLDSLVDFSTNNQKKAQDSSLHMPERAVFRLRKWIIFRLVSIVDSLHLEMEEALTEQVARFCLFHSFFVTKKPTSQIPETKHPFSFPLENQAREAVSSAFFSLLQTLSTQFKQAPGQTQGGQPWTYHLVQFADLLLNHSHNVTTVTPFTAQQRQAWDRMLQTLKELEAHSAEARAAAFQHLLLLVGIHLLKSPAESCDLLGDIQTCIRKSLGEKPRRSRTKTIDPQEPPWVEVLVEILLALLAQPSHLMRQVARSVFGHICSHLTPRALQLILDVLNPETSEDENDRVVVTDDSDERRLKGAEDKSEEGEDNRSSESEEESEGEESEEEERDGDVDQGFREQLMTVLQAGKALGGEDSENEEELGDEAMMALDQSLASLFAEQKLRIQARRDEKNKLQKEKALRRDFQIRVLDLVEVLVTKQPENALVLELLEPLLSIIRRSLRSSSSKQEQDLLHKTARIFTHHLCRARRYCHDLGERAGALHAQVERLVQQAGRQPDSPTALYHFNASLYLLRVLKGNTAEGCVHETQEKQKAGTDPSHMPTGPQAASCLDLNLVTRVYSTALSSFLTKRNSPLTVPMFLSLFSRHPVLCQSLLPILVQHITGPVRPRHQACLLLQKTLSMREVRSCFEDPEWKQLMGQVLAKVTENLRVLGEAQTKAQHQQALSSLELLNVLFRTCKHEKLTLDLTVLLGVLQGQQQSLQQGAHSTGSSRLHDLYWQAMKTLGVQRPKLEKKDAKEIPSATQSPISKKRKKKGFLPETKKRKKRKSEDGTPAEDGTPAATGGSQPPSMGRKKRNRTKAKVPAQANGTPTTKSPAPGAPTRSPSTPAKSPKLQKKNQKPSQVNGAPGSPTEPAGQKQHQKALPKKGVLGKSPLSALARKKARLSLVIRSPSLLQSGAKKKAQTLRFTISSSKK

SEQ ID NO: 105 - protein, 574 aa, Homo sapiens
MKETIQGTGSWGPEPPGPGIPPAYSSPRRERLRWPPPPKPRLKSGGGFGPDPGSGTTVPARRLPVPRPSFDASASEEEEEEEEEEDEDEEEEVAAWRLPPRWSQLGTSQRPRPSRPTHRKTCSQRRRRAMRAFRMLLYSKSTSLTFHWKLWGRHRGRRRGLAHPKNHLSPQQGGATPQVPSPCCRFDSPRGPPPPRLGLLGALMAEDGVRGSPPVPSGPPMEEDGLRWTPKSPLDPDSGLLSCTLPNGFGGQSGPEGERSLAPPDASILISNVCSIGDHVAQELFQGSDLGMAEEAERPGEKAGQHSPLREEHVTCVQSILDEFLQTYGSLIPLSTDEVVEKLEDIFQQEFSTPSRKGLVLQLIQSYQRMPGNAMVRGFRVAYKRHVLTMDDLGTLYGQNWLNDQVMNMYGDLVMDTVPEKVHFFNSFFYDKLRTKGYDGVKRWTKNVDIFNKELLLIPIHLEVHWSLISVDVRRRTITYFDSQRTLNRRCPKHIAKYLQAEAVKKDRLDFHQGWKGYFKMNVARQNNDSDCGAFVLQYCKHLALSQPFSFTQQDMPKLRRQIYKELCHCKLTV

SEQ ID NO: 106 - protein, 447 aa, Homo sapiens
MMVLFETSVGYAIFKVLNEKKLQEVDSLWKEFETPEKANKIVKLKHFEKFQDTAEALAAFTALMEGKINKQLKKVLKKIVKEAHEPLAVADAKLGGVIKEKLNLSCIHSPVVNELMRGIRSQMDGLIPVVEPREMAAMCLGLAHSLSRYRLKFSADKVDTMIVQAISLLDDLDKELNNYIMRCREWYGWHFPELGKIISDNLTYCKCLQKVGDRKNYASAKLSELLPEEVEAEVKAAAEISMGTEVSEEDICNILHLCTQVIEISEYRTQLYEYLQNRMVAIAPNVTVMVGELVGARLIAHAGSLLNLAKHAASTVQILGAEKALFRALKSRRDTPKYGLIYHASLVGQTSPKHKGKISRMLAAKTVLAIRYDAFGEDSSSAMGVENRAKLEARLRTLEDRGIRKISGTGKALAKTEKYEHKSEVKTYDPSGDSTLPTCSKKTQNTT

SEQ ID NO: 107 - protein, 529 aa, Homo sapiens; identical to SEQ ID NO: 78

SEQ ID NO: 108 - protein, 734 aa, Homo sapiens
MSWESGAGPGLGSQGMDLVWSAWYGKCVKGKGSLPLSAHGIVVAWLSRAEWDQVTVYLFCDDHKLQRYALNRITVWRSRSGNELPLAVASTADLIRCKLLDVTGGLGTDELRLLYGMALVRFVNLISERKTKFAKVPLKCLAQEVNIPDWIVDLRHELTHKKMPHINDCRRGCYFVLDWLQKTYWCRQLENSLRETWELEEFREGIEEEDQEEDKNIVVDDITEQKPEPQDDGKSTESDVKADGDSKGSEEVDSHCKKALSHKELYERARELLVSYEEEQFTVLEKFRYLPKAIKAWNNPSPRVECVLAELKGVTCENREAVLDAFLDDGFLVPTFEQLAALQIEYEDGQTEVQRGEGTDPKSHKNVDLNDVLVPKPFSQFWQPLLRGLHSQNFTQALLERMLSELPALGISGIRPTYILRWTVELIVANTKTGRNARRFSAGQWEARRGWRLFNCSASLDWPRMVESCLGSPCWASPQLLRIIFKAMGQGLPDEEQEKLLRICSIYTQSGENSLVQEGSEASPIGKSPYTLDSLYWSVKPASSSFGSEAKAQQQEEQGSVNDVKEEEKEEKEVLPDQVEEEEENDDQEEEEEDEDDEDDEEEDRMEVGPFSTGQESPTAENARLLAQKRGALQGSAWQVSSEDVRWDTFPLGRMPGQTEDPAELMLENYDTMYLLDQPVLEQRLEPSTCKTDTLGLSCGVGSGNCSNSSSSNFEGLLWSQGQLHGLKTGLQLF

SEQ ID NO: 109 - protein, 471 aa, Homo sapiens [sequence omitted]

SEQ ID NO: 110 - protein, 734 aa, Homo sapiens
VLNDGAPNVGASWVHDAYSQAHLTLMALRLACDFLARGGSFITKVFRSRDYQPLLWIFQQLFRRVQATKPQASRHESAEIFVVCQGFLAPDKVDSKFFDPKFAFKEVEVQAKTVTELVTKKKPKAEGYAEGDLTLYHRTSVTDFLRAANPVDFLSKASEIMVDDEELAQHPATTEDIRVCCQDIRVLGRKELRSLLNWRTKLRRYVAKKLKEQAKALDISLSSGEEDEGDEEDSTAGTTKQPSKEEEEEEEEEQLNQTLAEMKAQEVAELKRKKKKLLREQRKQRERVELKMDLPGVSIADEGETGMFSLCTIRGHQLLEEVTQGDMSAADTFLSDLPRDDIYVSDVEDDGDDTSLDSDLDPEELAGVRGHQGLRDQKRMRLTEVQDDKEEEEEENPLLVPLEEKAVLQEEQANLWFSKGSFAGIEDDADEALEISQAQLLFENRRKGRQQQQKQQLPQTPPSCLKTEIMSPLYQDEAPKGTEASSGTEAATGLEGEEKDGISDSDSSTSSEEEESWEPLRGKKRSRGPKSDDDGFEIVPIEDPAKHRILDPEGLALGAVIASSKKAKRDLIDNSFNRYTFNEDEGELPEWFVQEEKQHRIRQLPVGKKEVEHYRKRWREINARPIKKVAEAKARKKRRMLKRLEQTRKKAEAVVNTVDISEREKVAQLRSLYKKAGLGKEKRHVTYVVAKKGVGRKVRRPAGVRGHFKVVDSRMKKDQRAQQRKEQKKKHKRK

SEQ ID NO: 111 - protein, 125 aa, Gallus gallus
MAMQAAKRANIRLPPEVNRILYIRNLPYKITAEEMYDIFGKYGPIRQIRVGNTPETRGTAYVVYEDIFDAKNACDHLSGFNVCNRYLVVLYYNANRAFQKMDTKKKEEQLKLLKEKYGINTDPPK

SEQ ID NO: 112 - protein, 252 aa, Homo sapiens
MESEMETQSARAEEGFTQVTRKGGRRAKKRQAEQLSAAGEGGDAGRMDTEEARPAKRPVFPPLCGDGLLSGKEETRKIPVPANRYTPLKENWMKIFTPIVEHLGLQIRFNLKSRNVEIRTCKETKDVSALTKAADFVKAFILGFQVEDALALIRLDDLFLESFEITDVKPLKGDHLSRAIGRIAGKGGKTKFTIENVTRTRIVLADVKVHILGSFQNIKMARTAICNLILGNPPSKVYGNIRAVASRSADRF

SEQ ID NO: 113 - protein, 159 aa, Homo sapiens
MKKMLVGFLRTQHVWKPPTTVPSGTQQAPVFVEVALWNIPISCLLIALRELKKKLFKRRRVLNRERRLRHRVVGAVIDQGLITRHHLKKRASSARANITLSGKKRRKLLQQIRLAQKEKTAMEVEAPSKPARTSEPQLKRQKKTKAPQDVEMKDLEDES

SEQ ID NO: 114 - protein, 732 aa, Homo sapiens
MVRSGNKAAVVLCMDVGFTMSNSIPGIESPFEQAKKVITMFVQRQVFAENKDEIALVLFGTDGTDNPLSGGDQYQNITVHRHLMLPDFDLLEDIESKIQPGSQQADFLDALIVSMDVIQHETIGKKFEKRHIEIFTDLSSRFSKSQLDIIIHSLKKCDISLQFFLPFSLGKEDGSGDRGDGPFRLGGHGPSFPLKGITEQQKEGLEIVKMVMISLEGEDGLDEIYSFSESLRKLCVFKKIERHSIHWPCRLTIGSNLSIRIAAYKSILQERVKKTWTVVDAKTLKKEDIQKETVYCLNDDDETEVLKEDIIQGFRYGSDIVPFSKVDEEQMKYKSEGKCFSVLGFCKSSQVQRRFFMGNQVLKVFAARDDEAAAVALSSLIHALDDLDMVAIVRYAYDKRANPQVGVAFPHIKHNYECLVYVQLPFMEDLRQYMFSSLKNSKKYAPTEAQLNAVDALIDSMSLAKKDEKTDTLEDLFPTTKIPNPRFQRLFQCLLHRALHPREPLPPIQQHIWNMLNPPAEVTTKSQIPLSKIKTLFPLIEAKKKDQVTAQEIFQDNHEDGPTAKKLKTEQGGAHFSVSSLAEGSVTSVGSVNPAENFRVLVKQKKASFEEASNQLINHIEQFLDTNETPYFMKSIDCIRAFREEAIKFSEEQRFNNFLKALQEKVEIKQLNHFWEIVVQDGITLITKEEASGSSVTAEEAKKFLAPKDKPSGDTAAVFEEGGDVDDLLDMI

SEQ ID NO: 115 - protein, 354 aa, Homo sapiens
MAATKRKRRGRLCSSGEEAKKKRNRCGPPAKRHVTAEEVEEEERDRIPGPVCKGKWKNKERILIFSSRGINFRTRHLMQDLRMLMPHSKADTKMDRKDKLFVINEVCEMKNCNKCIYFEAKKKQDLYMWLSNSPHGPSAKFLVQNIHTLAELKMTGNCLKGSRPLLSFDPAFDELPHYALLKELLIQIFSTPRYHPKSQPFVDHVFTFTILDNRIWFRNFQIIEEDAALVEIGPRFVLNLIKIFQGSFGGPTLYENPHYQSPNMHRRVIRSITAAKYREKQQVKDVPQKLRKKEPKTLLPHDPTADVFVTPAEEKPIEIQWVKPEPKVDLKARKKRIYKRQRKMKQRMDSGKTK

SEQ ID NO: 116 - protein, 551 aa, Homo sapiens
MADGVDHINIYADVGEEFNQEAEYGGHDQIDLYDDVISPSANNGDAPEDRDYMDTLPPTVGDDVGKGAAPNVVYTYTGKRIALYIGNLTWWTTDEDLTEAVHSLGVNDILEIKFFENRANGQSKGFALVGVGSEASSKKLMDLLPKRELHGQNPVVTPCNKQFLSQFEMQSRKTTQSGQMSGEGKAGPPGGSSRAAFPQGGRGRGRFPGAVPGGDRFPGPAGPGGPPPPFPAGQTPPRPPLGPPGPPGPPGPPPPGQVLPPPLAGPPNRGDRPPPPVLFPGQPFGQPPLGPLPPGPPPPVPGYGPPPGPPPPQQGPPPPPGPFPPRPPGPLGPPLTLAPPPHLPGPPPGAPPPAPHVNPAFFPPPTNSGMPTSDSRGPPPTDPYGRPPPYDRGDYGPPGREMDTARTPLSEAEFEEIMNRNRAISSSAISRAVSDASAGDYGSAIETLVTAISLIKQSKVSADDRCKVLISSLQDCLHGIESKSYGSGSRRERSRERDHSRSREKSRRHKSRSRDRHDDYYRERSRERERHRDRDRDRDRERDREREYRHR

SEQ ID NO: 117 - protein, 227 aa, Homo sapiens
MSVVPPNRSQTGWPRGVTQFGNKYIQQTKPLTLERTINLYPLTNYTFGTKEPLYEKDSSVAARFQRMREEFDKIGMRRTVEGVLIVHEHRLPHVLLLQLGTTFFKLPGGELNPGEDEVEGLKRLMTEILGRQDGVLQDWVIDDCIGNWWRPNFEPPQYPYIPAHITKPKEHKKLFLVQLQEKALFAVPKNYKLVAAPLFELYDNAPGYGPIISSLPQLLSRFNFIYN

SEQ ID NO: 118 - protein, 1047 aa, Homo sapiens
MAVTLDKDAYYRRVKRLYSNWRKGEDEYANVDAIVVSVGVDEEIVYAKSTALQTWLFGYELTDTIMVFCDDKIIFMASKKKVEFLKQIANTKGNENANGAPAITLLIREKNESNKSSFDKMIEAIKESKNGKKIGVFSKDKFPGEFMKSWNDCLNKEGFDKIDISAVVAYTIAVKEDGELNLMKKAASITSEVFNKFFKERVMEIVDADEKVRHSKLAESVEKAIEEKKYLAGADPSTVEMCYPPIIQSGGNYNLKFSVVSDKNHMHFGAITCAMGIRFKSYCSNLVRTLMVDPSQEVQENYNFLLQLQEELLKELRHGVKICDVYNAVMDVVKKQKPELLNKITKNLGFGMGIEFREGSLVINSKNQYKLKKGMVFSINLGFSDLTNKEGKKPEEKTYALFIGDTVLVDEDGPATVLTSVKKKVKNVGIFLKNEDEEEEEEEKDEAEDLLGRGSRAALLTERTRNEMTAEEKRRAHQKELAAQLNEEAKRRLTEQKGEQQIQKARKSNVSYKNPSLMPKEPHIREMKIYIDKKYETVIMPVFGIATPFHIATIKNISMSVEGDYTYLRINFYCPGSALGRNEGNIFPNPEATFVKEITYRASNIKAPGEQTVPALNLQNAFRIIKEVQKRYKTREAEEKEKEGIVKQDSLVINLNRSNPKLKDLYIRPNIAQKRMQGSLEAHVNGFRFTSVRGDKVDILYNNIKHALFQPCDGEMIIVLHFHLKNAIMFGKKRHTDVQFYTEVGEITTDLGKHQHMHDRDDLYAEQMEREMRHKLKTAFKNFIEKVEALTKEELEFEVPFRDLGFNGAPYRSTCLLQPTSSALVNATEWPPFVVTLDEVELIHFERVQFHLKNFDMVIVYKDYSKKVTMINAIPVASLDPIKEWLNSCDLKYTEGVQSLNWTKIMKTIVDDPEGFFEQGGWSFLEPEGEGSDAEEGDSESEIEDETFNPSEDDYEEEEEDSDEDYSSEAEESDYSKESLGSEEESGKDWDELEEEARKADRESRYEEEEEQSRSMSRKRKASVHSSGRGSNRGSRHSSAPPKKKRK

SEQ ID NO: 119 - protein, 1233 aa, Homo sapiens
MGFLKLIEIENFKSYKGRQIIGPFQRFTAIIGPNGSGKSNLMDAISFVLGEKTSNLRVKTLRDLIHGAPVGKPAANRAFVSMVYSEEGAEDRTFARVIVGGSSEYKINNKVVQLHEYSEELEKLGILIKARNFLVFQGAVESIAMKNPKERTALFEEISRSGDVAQEYDKRKKEMVKAEEDTQFNYHRKKNIAAERKEAKQEKEEADRYQRLKDEVVRAQVQLQLFKLYHNEVEIEKLNKELASKNKEIEKDKKRMDKVEDELKEKKKELGKMMREQQQIEKEIKEKDSELNQKRPQYIKAKENTSHKIKKLEAAKKSLQNAQKHYKKRKGDMDELEKEMLSVEKARQEFEERMEEESQSQGRDLTLEENQVKKYHRLKEEASKRAATLAQELEKFNRDQKADQDRLDLEERKKVETEAKIKQKLREIEENQKRIEKLEEYITTSKQSLEEQKKLEGELTEEVEMAKRRIDEINKELNQVMEQLGDARIDRQESSRQQRKAEIMESIKRLYPGSVYGRLIDLCQPTQKKYQIAVTKVLGKNMDAIIVDSEKTGRDCIQYIKEQRGEPETFLPLDYLEVKPTDEKLRELKGAKLVIDVIRYEPPHIKKALQYACGNALVCDNVEDARRIAFGGHQRHKTVALDGTLFQKSGVISGGASDLKAKARRWDEKAVDKLKEKKERLTEELKEQMKAKRKEAELRQVQSQAHGLQMRLKYSQSDLEQTKTRHLALNLQEKSKLESELANFGPRINDIKRIIQSREREMKDLKEKMNQVEDEVFEEFCREIGVRNIREFEEEKVKRQNEIAKKRLEFENQKTRLGIQLDFEKNQLKEDQDKVHMWEQTVKKDENEIEKLKKEEQRHMKIIDETMAQLQDLKNQHLAKKSEVNDKNHEMEEIRKKLGGANKEMTHLQKEVTAIETKLEQKRSDRHNLLQACKMQDIKLPLSKGTMDDISQEEGSSQGEDSVSGSQRISSIYAREALIEIDYGDLCEDLKDAQAEEEIKQEMNTLQQKLNEQQSVLQRIAAPNMKAMEKLESVRDKFQETSDEFEAARKRAKKAKQAFEQIKKERFDRFNACFESVATNIDEIYKALSRNSSAQAFLGPENPEEPYLDGINYNCVAPGKRFRPMDNLSGGEKTVAALALLFAIHSYKPAPFFVLDEIDAALDNTNIGKVANYIKEQSTCNFQAIVISLKEEFYTKAESLIGVYPEQGDCVISKVLTFDLTKYPDANPNPNEQ

SEQ ID NO: 120 - protein, 421 aa, Homo sapiens
MSPKRIAKRRSPPADAIPKSKKVKVSHRSHSTEPGLVLTLGQGDVGQLGLGENVMERKKPALVSIPEDVVQAEAGGMHTVCLSKSGQVYSFGCNDEGALGRDTSVEGSEMVPGKVELGEKVVQVSAGDSHTAALTDDGRVFLWGSFRDNNGVIGLLEPMKKSMVPVQVQLDVPVVKVASGNDHLVMLTADGDLYTLGCGEQGQLGRVPELFANRGGRQGLERLLVPKCVMLKSRGSRGHVRFQDAFCGAYFTFAISHEGHVYGFGLSNYHQLGTPGTESCFIPQNLTSFKNSTKSWVGFSGGQHHTVCMDSEGKAYSLGRAEYGRLGLGEGAEEKSIPTLISRLPAVSSVACGASVGYAVTKDGRVFAWGMGTNYQLGTGQDEDAWSPVEMMGKQLENRVVLSVSSGGQHTVLLVKDKEQS

SEQ ID NO: 121 - protein, 565 aa, Homo sapiens
MVRSGNKAAVVLCMDVGFTMSNSIPGIESPFEQAKKVITMFVQRQVFAENKDEIALVLFGTDGTDNPLSGGDQYQNITVHRHLMLPDFDLLEDIESKIQPGSQQADFLDALIVSMDVIQHETIGKKFEKRHIEIFTDLSSRFSKSQLDIIIHSLKKCDISLQFFLPFSLGKEDGSGDRGDGPFRLGGHGPSFPLKGITEQQKEGLEIVKMVMISLEGEDGLDEIYSFSESLRKLCVFKKIERHSIHWPCRLTIGSNLSIRIAAYKSILQERVKKTWTVVDAKTLKKEDIQKETVYCLNDDDETEVLKEDIIQGFRYGSDIVPFSKVDEEQMKYKSEGKCFSVLGFCKSSQVQRRFFMGNQVLKVFAARDDEAAAVALSSLIHALDDLDMVAIVRYAYDKRANPQVGVAFPHIKHNYECLVYVQLPFMEDLRQYMFSSLKNSKKYAPTEAQLNAVDALIDSMSLAKKDEKTDTLEDLFPTTKIPNPRFQRLFQCLLHRALHPREPLPPIQQHIWNMLNPPAEVTTKSQIPLSKIKTLFPLIEAKKKDQVTAQEIFQDNHEDGPTAK

SEQ ID NO: 122 - protein, 573 aa, Homo sapiens
MLRLPTVFRQMRPVSRVLAPHLTRAYAKDVKFGADARALMLQGVDLLADAVAVTMGPKGRTVIIEQSWGSPKVTKDGVTVAKSIDLKDKYKNIGAKLVQDVANNTNEEAGDGTTTATVLARSIAKEGFEKISKGANPVEIRRGVMLAVDAVIAELKKQSKPVTTPEEIAQVATISANGDKEIGNIISDAMKKVGRKGVITVKDGKTLNDELEIIEGMKFDRGYISPYFINTSKGQKCEFQDAYVLLSEKKISSIQSIVPALEIANAHRKPLVIIAEDVDGEALSTLVLNRLKVGLQVVAVKAPGFGDNRKNQLKDMAIATGGAVFGEEGLTLNLEDVQPHDLGKVGEVIVTKDDAMLLKGKGDKAQIEKRIQEIIEQLDVTTSEYEKEKLNERLAKLSDGVAVLKVGGTSDVEVNEKKDRVTDALNATRAAVEEGIVLGGGCALLRCIPALDSLTPANEDQKIGIEIIKRTLKIPAMTIAKNAGVEGSLIVEKIMQSSSEVGYDAMAGDFVNMVEKGIIDPTKVVRTALLDAAGVASLLTTAEVVVTEIPKEEKDPGMGAMGGMGGGMGGGMF

SEQ ID NO: 123 - protein, 588 aa, Homo sapiens
MADGVDHIDIYADVGEEFNQEAEYGGHDQIDLYDDVISPSANNGDAPEDRDYMDTLPPTVGDDVGKGAAPNVVYTYTGKRIALYIGNLTWWTTDEDLTEAVHSLGVNDILEIKFFENRANGQSKGFALVGVGSEASSKKLMDLLPKRELHGQNPVVTPCNKQFLSQFEMQSRKTTQSGQMSGEGKAGPPGGSSRAAFPQGGRGRGRFPGAVPGGDRFPGPAGPGGPPPPFPGNLIKHLVKGTRPLFLETRIPWHMGHSIEEIPIFGLKAGQTPPRPPLGPPGPPGPPGPPPPGQVLPPPLAGPPNRGDRPPPPVLFPGQPFGQPPLGPLPPGPPPPVPGYGPPPGPPPPQQGPPPPPGPFPPRPPGPLGPPLTLAPPPHLPGPPPGAPPPAPHVNPAFFPPPTNSGMPTSDSRGPPPTDPYGRPPPYDRGDYGPPGREMDTARTPLSEAEFEEIMNRNRAISSSAISRAVSDASAGDYGSAIETLVTAISLIKQSKVSADDRCKVLISSLQDCLHGIESKSYGSGSRRERSRERDHSRSREKSRRHKSRSRDRHDDYYRERSRERERHRDRDRDRDRERDREREYRHR

SEQ ID NO: 124 - protein, 388 aa, Homo sapiens
TPSNGAEGLTPRSGTTPKPVINSTPGRTPLRDKLNINPEDGMADYSDPSYVKQMERESREHLRLGLLGLPAPKNDFEIVLPENAEKELEEREIDDTYIEDAADVDARKQAIRDAERVKEMKRMHKAVQKDLPRPSEVNETILRPLNVEPPLTDLQKSEELIKKEMITMLHYDLLHHPYEPSGNKKGKTVGFGTNNSEHITYLEHNPYEKFSKEELKKAQDVLVQEMEVVKQGMSHGELSSEAYNQVWEECYSQVLYLPGQSRYTRANLASKKDRIESLEKRLEINRGHMTTEAKRAAKMEKKMKILLGGYQSRAMGLMKQLNDLWDQIEQAHLELRTFEELKKHEDSAIPRRLECLKEDVQRQQEREKELQHRYADLLLEKETLKSKF

SEQ ID NO: 125 - protein, 650 aa, Homo sapiens
MRGGGFGDRDRDRDRGGFGARGGGGLPPKKFGNPGERLRKKKWDLSELPKFEKNFYVEHPEVARLTPYEVDELRRKKEITVRGGDVCPKPVFAFHHANFPQYVMDVLMDQHFTEPTPIQCQGFPLALSGRDMVGIAQTGSGKTLAYLLPAIVHINHQPYLERGDGPICLVLAPTRELAQQVQQVADDYGKCSRLKSTCIYGGAPKGPQIRDLERGVEICIATPGRLIDFLESGKTNLRRCTYLVLDEADRMLDMGFEPQIRKIVDQIRPDRQTLMWSATWPKEVRQLAEDFLRDYTQINVGNLELSANHNILQIVDVCMESEKDHKLIQLMEEIMAEKENKTIIFVETKRRCDDLTRRMRRDGWPAMCIHGDKSQPERDWVLNEFRSGKAPILIATDVASRGLDVEDVKFVINYDYPNSSEDYVHRIGRTARSTNKGTAYTFFTPGNLKQARELIKVLEEANQAINPKLMQLVDHRGGGGGGGGRSRYRTTSSANNPNLMYQDECDRRLRGVKDGGRRDSASYRDRSETDRAGYANGSGYGSPNSAFGAQAGQYTYGQGTYGAAAYGTSSYTAQEYGAGTYGASSTTSTGRSSQSSSQQFSGIGRSGQQPQPLMSQQFAQPPGATNMIGYMGQTAYQYPPPPPPPPPSRK

SEQ ID NO: 126 - protein, 4128 aa, Homo sapiens [sequence omitted]

SEQ ID NO: 127 - protein, 1530 aa, Homo sapiens
MEVSPLQPVNENMQVNKIKKNEDAKKRLSVERIYQKKTQLEHILLRPDTYIGSVELVTQQMWVYDEDVGINYREVTFVPGLYKIFDEILVNAADNKQRDPKMSCIRVTMIRKQLISIWNNGKGIPVVEHKVEKMYVPALIFGQLLTSSNYDDDEKKVTGGRNGYGAKLCNIFSTKFTVETASREYKKMFKQTWMDNMGRAGEMELKPFNGEDYTCITFQPDLSKFKMQSLDKDIVALMVRRAYDIAGSTKDVKVFLNGNKLPVKGFRSYVDMYLKDKLDETGNSLKVIHEQVNHRWEVCLTMSEKGFQQISFVNSIATSKGGRHVDYVADQIVTKLVDVVKKKNKGGVAVKAHQVKNHMWIFVNALIENPTFDSQTKENMTLQPKSFGSTCQLSEKFIKAAIGCGIVESILNWVKFKAQVQLNKKCSAVKHNRIKGIPKLDDANDAGGRNSTECTLILTEGDSAKTLAVSGLGVVGRDKYGVFPLRGKILNVREASHKQIMENAEINNIIKIVGLQYKKNYEDEDSLKTLRYGKIMIMTDQDQDGSHIKGLLINFIHHNWPSLLRHRFLEEFITPIVKVSKNKQEMAFYSLPEFEEWKSSTPNHKKWKVKYYKGLGTSTSKEAKEYFADMKRHRIQFKYSGPEDDAAISLAFSKKQIDDRKEWLTNFMEDRRQRKLLGLPEDYLYGQTTTYLTYNDFINKELILFSNSDNERSIPSMVDGLKPGQRKVLFTCFKRNDKREVKVAQLAGSVAEMSSYHHGEMSLMMTIINLAQNFVGSNNLNLLQPIGQFGTRLHGGKDSASPRYIFTMLSSLARLLFPPKDDHTLKFLYDDNQRVEPEWYIPIIPMVLINGAEGIGTGWSCKIPNFDVREIVNNIRRLMDGEEPLPMLPSYKNFKGTIEELAPNQYVISGEVAILNSTTIEISELPVRTWTQTYKEQVLEPMLNGTEKTPPLITDYREYHTDTTVKFVVKMTEEKLAEAERVGLHKVFKLQTSLTCNSMVLFDHVGCLKKYDTVLDILRDLFELRLKYYGLRKEWLLGMLGAESAKLNNQARFILEKIDGKIIIENKPKKELIKVLIQRGYDSDPVKAWKEAQQKVPDEEENEESDNEKETEKSDSVTDSGPTFNYLLDMPLWYLTKEKKDELCRLRNEKEQELDTLKRKSPSDLWKEDLATFIEELEAVEAKEKQDEQVGLPGKGGKAKGKKTQMAEVLPSPRGQRVIPRITIEMKAEAEKKNKKKIKNENTEGSPQEDGVELEGLKQRLEKKQKREPGTKTKKQTTLAFKPIKKGKKRNPWPDSESDRSSDESNFDVPPRETEPRRAATKTKFTMDLDSDEDFSDFDEKTDDEDFVPSDASPPKTKTSPKLSNKELKPQKSVVSDLEADDVKGSVPLSSSPPATHFPDETEITNPVPKKNVTVKKTAAKSQSSTSTTGAKKRAAPKGTKRDPALNSGVSQKPDPAKTKNRRKRKPSTSDDSDSNFEKIVSKAVTSKKSKGESDDFHMDFDSAVAPRAKSVRAKKPIKYLEESDEDDLF

SEQ ID NO: 128 - protein, 1279 aa, Homo sapiens
MGDVKNFLYAWCGKRKMTPTYEIRAVGNKNRQKFMCEVQVEGYNYTGMGNSTNKKDAQSNAARDFVNYLVRINEIKSEEVPAFGVASPPPLTDTPDTTANAEGDLPTHHGGPLLHILALKAENNSEVGASGYGVPGPTWDRGANLKDYYSRKEEQEVQATLESEEVDLNAGLHGNWTLENAKARLIQYFQKEKIQGEYKYTQVGPDHNRSFIAEMTIYIKQLGRRIFAREHGSNKKLAAQSCALSLVRQLYHLGVVEAYTGLTKKKEGETVEPYKVNLSQDLEHQLQNIIQELNLEILPPPEDPSVPVALNIGKLAQFEPSQRQNQVGVVPWSPPQSNWNPWTSSNIDEGPLAFATPEQISMDLKNELMYQLEQDHDLQAILQERELLPVKKFESEILEAISQNSVVIIRGATGCGKTTQVPQFILDDFIQNDRAAECNIVVTQPRRISAVSVAERVAFERGEEPGKSCGYSVRFESVLPRPHASIMFCTVGVLLRKLEAGIRGISHVIVDEIHERDINTSFLLVVLRDVVQAYPEVRIVFMSATIDTSMFCEYFFNCPSLKLWRTYPVQEYFLEDCIQMTHFVPPPKDKKKKDKDDDGGEDDDANCNLICGDEYGPETRLSMSQLNEKETPFELIEALLKYIETLNVPGAVLVFLPGWNLIYTMQKHLEMNPHFGSHRYQILPLHSQIPREEQRKVFDPVPVGVTKVILSTNIAETSITINDVVYVIDSCKQKVKLFTAHNNMTNYSTVWASKTNLEQRKGRAGRSTAGFCFHLCSRARFERLETHMTPEMFRTPLHEIALSIKLLRLGGIGQFLAKAIEPPPLDAVIEAEHTLRELDALDANDELTPLGRILAKLPIEPRFGKMMIMGCIFYVGDAICTIAAATCFPEPFVNEGKQLGYIHRNFAGNRFSDHVALLSVFQAWDDARMGGEEAEIRFCEHKRLNMATLRMTWEAKVQLKEILINSGFPEDCLLTQVFTNTGPDNNLDVVISLLAFGVYPNVCYHKEKRKILTTEGRNALIHKSSVNCPFSSQDMNYPSPFFVFGEKIRTRAISAKGMTLVPPLQLLLFASKKVQSDGQIVLVDDWIKLQISHEAAACITGLRAAMEALVVEVTKQPAIISQLDPVNERMLNMIRQISEPSAAGINLMIGSTRYGDGPRPPKMARYDNGSGYRRGGSSYSGGGYGGGYSSGGYGSGGYGGSATPSGRICAGVGGGYRGVSRGGFRGNSGGDYRGPSGGYRGSGGFQRGGGRGAYGTGYLDIEEEVAAIKLGYVSSVCRQ

SEQ ID NO: 129 - protein, 560 aa, Homo sapiens
MKRPKLKKASKRMTCHKRYKIQKKVREHHRKLRKEAKKQGHKKPRKDPGVPNSAPFKEALLREAELRKQRLEELKQQQKLDRQKELEKKRKLETNPDIKPSNVEPMEKEFGLCKTENKAKSGKQNSKKLYCQELKKVIEASDVVLEVLDARDPLGCRCPQVEEAIVQSGQKKLVLILNKSDLVPKENLESWLNYLKKELPTVVFRASTKPKDKGKITKRVKAKKNAAPFRSEVCFGKEGLWKLLGGFQETCSKAIRVGVIGFPNVGKSSIINSLKQEQMCNVGVSMGLTRSMQVVPLDKQITIIDSPSFIVSPLNSSSALALRSPASIEVVKPMEAASAILSQADARQVVLKYTVPGYRNSLEFFTMLAQRRGMHQKGGIPNVEGAAKLLWSEWTGASLAYYCHPPTSWTPPPYFNESIVVDMKSGFNLEELEKNNAQSIRAIKGPHLANSILFQSSGLTNGIIEEKDIHEELPKRKERKQEEREDDKDSDQETVDEEVDENSSGMFAAEETGEALLRRLQQVNSLQGLLSWIKSLKRMMLMTSVQIMCNRTMAFYDFFF

SEQ ID NO: 130 - protein, 2136 aa, Homo sapiens
MADVTARSLQYEYKANSNLVLQADRSLIDRTRRDEPTGEVLSLVGKLEGTRMGDKAQRTKPQMQEERRAKRRKRDEDRHDINKMKGYTLLSEGIDEMVGIIYKPKTKETRETYEVLLSFIQAALGDQPRDILCGAADEVLAVLKNEKLRDKERRKEIDLLLGQTDDTRYHVLVNLGKKITDYGGDKEIQNMDDNIDETYGVNVQFESDEEEGDEDVYGEVREEASDDDMEGDEAVVRCTLSANLVASGELMSSKKKDLHPRDIDAFWLQRQLSRFYDDAIVSQKKADEVLEILKTASDDRECENQLVLLLGFNTFDFIKVLRQHRMMILYCTLLASAQSEAEKERIMGKMEADPELSKFLYQLHETEKEDLIREERSRRERVRQSRMDTDLETMDLDQGGEALAPRQVLDLEDLVFTQGSHFMANKRCQLPDGSFRRQRKGYEEVHVPALKPKPFGSEEQLLPVEKLPKYAQAGFEGFKTLNRIQSKLYRAALETDENLLLCAPTGAGKTNVALMCMLREIGKHINMDGTINVDDFKIIYIAPMRSLVQEMVGSFGKRLATYGITVAELTGDHQLCKEEISATQIIVCTPEKWDIITRKGGERTYTQLVRLIILDEIHLLHDDRGPVLEALVARAIRNIEMTQEDVRLIGLSATLPNYEDVATFLRVDPAKGLFYFDNSFRPVPLEQTYVGITEKKAIKRFQIMNEIVYEKIMEHAGKNQVLVFVHSRKETGKTARAIRDMCLEKDTLGLFLREGSASTEVLRTEAEQCKNLELKDLLPYGFAIHHAGMTRVDRTLVEDLFADKHIQVLVSTATLAWGVNLPAHTVIIKGTQVYSPEKGRWTELGALDILQMLGRAGRPQYDTKGEGILITSHGELQYYLSLLNQQLPIESQMVSKLPDMLNAEIVLGNVQNAKDAVNWLGYAYLYIRMLRSPTLYGISHDDLKGDPLLDQRRLDLVHTAALMLDKNNLVKYDKKTGNFQVTELGRIASHYYITNDTVQTYNQLLKPTLSEIELFRVFSLSSEFKNITVREEEKLELQKLLERVPIPVKESIEEPSAKINVLLQAFISQLKLEGFALMADMVYVTQSAGRLMRAIFEIVLNRGWAQLTDKTLNLCKMIDKRMWQSMCPLRQFRKLPEEVVKKIEKKNFPFERLYDLNHNEIGELIRMPKMGKTIHKYVHLFPKLELSVHLQPITRSTLKVELTITPDFQWDEKVHGSSEAFWILVEDVDSEVILHHEYFLLKAKYAQDEHLITFFVPVFEPLPPQYFIRVVSDRWLSCETQLPVSFRHLILPEKYPPPTELLDLQPLPVSALRNSAFESLYQDKFPFFNPIQTQVFNTVYNSDDNVFVGAPTGSGKTICAEFAILRMLLQSSEGRCVYITPMEALAEQVYMDWYEKFQDRLNKKVVLLTGETSTDLKLLGKGNIIISTPEKWDILSRRWKQRKNVQNINLFVVDEVHLIGGENGPVLEVICSRMRYISSQIERPIRIVALSSSLSNAKDVAHWLGCSATSTFNFHPNVRPVPLELHIQGFNISHTQTRLLSMAKPVYHAITKHSPKKPVIVFVPSRKQTRLTAIDILTTCAADIQRQRFLHCTEKDLIPYLEKLSDSTLKETLLNGVGYLHEGLSPMERRLVEQLFSSGAIQVVVASRSLCWGMNVAAHLVIIMDTQYYNGKIHAYVDYPIYDVLQMVGHANRPLQDDEGRCVIMCQGSKKDFFKKFLYEPLPVESHLDHCMHDHFNAEIVTKTIENKQDAVDYLTWTFLYRRMTQNPNYYNLQGISHRHLSDHLSELVEQTLSDLEQSKCISIEDEMDVAPLNLGMIAAYYYINYTTIELFSMSLNAKTKVRGLIEIISNAAEYENIPIRHHEDNLLRQLAQKVPHKLNNPKFNDPHVKTNLLLQAHLSRMQLSAELQSDTEEILSKAIRLIQACVDVLSSNGWLSPALAAMELAQMVTQAMWSKDSYLKQLPHFTSEHIKRCTDKGVESVFDIMEMEDEERNALLQLTDSQIADVARFCNRYPNIELSYEVVDKDSIRSGGPVVVLVQLEREEEVTGPVIAPLFPQKREEGWWVVIGDAKSNSLISIKRLTLQQKAKVKLDFVAPATGAHNYTLYFMSDAYMGCDQEYKFSVDVKEAETDSDSD

SEQ ID NO: 131 - protein, 2335 aa, Homo sapiens [sequence omitted]

SEQ ID NO: 132 - protein, 806 aa, Homo sapiens [sequence omitted]

SEQ ID NO: 133 - protein, 730 aa, Homo sapiens
MAAGVEAAAEVAATEIKMEEESGAPGVPSGNGAPGPKGEGERPAQNEKRKEKNIKRGGNRFEPYANPTKRYRAFITNIPFDVKWQSLKDLVKEKVGEVTYVELLMDAEGKSRGCAVVEFKMEESMKKAAEVLNKHSLSGRPLKVKEDPDGEHARRAMQKVMATTGGMGMGPGGPGMITIPPSILNNPNIPNEIIHALQAGRLGSTVFVANLDYKVGWKKLKEVFSMAGVVVRADILEDKDGKSRGIGTVTFEQSIEAVQAISMFNGQLLFDRPMHVKMDERALPKGDFFPPERPQQLPHGLGGIGMGLGPGGQPIDANHLNKGIGMGNIGPAGMGMEGIGFGINKMGGMEGPFGGGMENMGRFGSGMNMGRINEILSNALKRGEIIAKQGGGGGGGSVPGIERMGPGIDRLGGAGMERMGAGLGHGMDRVGSEIERMGLVMDRMGSVERMGSGIERMGPLGLDHMASSIERMGQTMERIGSGVERMGAGMGFGLERMAAPIDRVGQTIERMGSGVERMGPAIERMGLSMERMVPAGMGAGLERMGPVMDRMATGLERMGANNLERMGLERMGANSLERMGLERMGANSLERMGPAMGPALGAGIERMGLAMGGGGGASFDRAIEMERGNFGGSFAGSFGGAGGHAPGVARKACQIFVRNLPFDFTWKMLKDKFNECGHVLYADIKMENGKSKGCGVVKFESPEVAERACRMMNGMKLSGREIDVRIDRNA

SEQ ID NO: 134 - protein, 633 aa, Homo sapiens
MANQVNGNAVQLKEEEEPMDTSSVTHTEHYKTLIEAGLPQKVAERLDEIFQTGLVAYVDLDERAIDALREFNEEGALSVLQQFKESDLSHVQNKSAFLCGVMKTYRQREKQGSKVQESTKGPDEAKIKALLERTGYTLDVTTGQRKYGGPPPDSVYSGVQPGIGTEVFVGKIPRDLYEDELVPLFEKAGPIWDLRLMMDPLSGQNRGYAFITFCGKEAAQEAVKLCDSYEIRPGKHLGVCISVANNRLFVGSIPKNKTKENILEEFSKVTEGLVDVILYHQPDDKKKNRGFCFLEYEDHKSAAQARRRLMSGKVKVWGNVVTVEWADPVEEPDPEVMAKVKVLFVRNLATTVTEEILEKSFSEFGKLERVKKLKDYAFVHFEDRGAAVKAMDEMNGKEIEGEEIEIVLAKPPDKKRKERQAARQASRSTAYEDYYYHPPPRMPPPIRGRGRGGGRGGYGYPPDYYGYEDYYDDYYGYDYHDYRGGYEDPYYGYDDGYAVRGRGGGRGGRGAPPPPRGRGAPPPRGRAGYSQRGAPLGPPRGSRGGRGGPAQQQRGRGSRGSRGNRGGNVGGKRKADGYNQPDSKRRQTNNQQNWGSQPIAQQPLQQGGDYSGNYGYNNDNQEFYQDTYGQQWK

SEQ ID NO: 135 - protein, 558 aa, Homo sapiens
MVKMAAAGGGGGGGRYYGGGSEGGRAPKRLKTDNAGDQHGGGGGGGGGAGAAGGGGGGENYDDPHKTPASPVVHIRGLIDGVVEADLVEALQEFGPISYVVVMPKKRQALVEFEDVLGACNAVNYAADNQIYIAGHPAFVNYSTSQKISRPGDSDDSRSVNSVLLFTILNPIYSITTDVLYTICNPCGPVQRIVIFRKNGVQAMVEFDSVQSAQRAKASLNGADIYSGCCTLKIEYAKPTRLNVFKNDQDTWDYTNPNLSGQGDPGSNPNKRQRQPPLLGDHPAEYGGPHGGYHSHYHDEGYGPPPPHYEGRRMGPPVGGHRRGPSRYGPQYGHPPPPPPPPEYGPHADSPVLMVYGLDQSKMNGDRVFNVFCLYGNVEKVKFMKSKPGAAMVEMADGYAVDRAITHLNNNFMFGQKLNVCVSKQPAIMPGQSYGLEDGSCSYKDFSESRNNRFSTPEQAAKNRIQHPSNVLHFFNAPLEVTEENFFEICDELGVKRPSSVKVFSGKSERSSSGLLEWESKSDALETLGFLNHYQMKNPNGPYPYTLKLCFSTAQHAS

SEQ ID NO: 136 - protein, 353 aa, Homo sapiens
MEKTLETVPLERKKREKEQFRKLFIGGLSFETTEESLRNYYEQWGKLTDCVVMRDPASKRSRGFGFVTFSSMAEVDAAMAARPHSIDGRVVEPKRAVAREESGKPGAHVTVKKLFVGGIKEDTEEHHLRDYFEEYGKIDTIEIITDRQSGKKRGFGFVTFDDHDPVDKIVLQKYHTINGHNAEVRKALSRQEMQEVQSSRSGRGGNFGFGDSRGGGGNFGPGPGSNFRGGSDGYGSGRGFGDGYNGYGGGPGGGNFGGSPGYGGGRGGYGGGGPGYGNQGGGYGGGYDNYGGGNYGSGNYNDFGNYNQQPSNYGPMKSGNFGGSRNMGGPYGGGNYGPGGSGGSGGYGGRSRY

SEQ ID NO: 137 - protein, 290 aa, Homo sapiens
MASNVTNKTDPRSMNSRVFIGNLNTLVVKKSDVEAIFSKYGKIVGCSVHKGFAFVQYVNERNARAAVAGEDGRMIAGQVLDINLAAEPKVNRGKAGVKRSAAEMYGSSFDLDYDFQRDYYDRMYSYPARVPPPPPIARAVVPSKRQRVSGNTSRRGKSGFNSKSGQRGSSKSGKLKGDDLQAIKKELTQIKQKVDSLLENLEKMEKEQSKQAVEMKNDKSEEEQSSSSVKKDETNVKMESEGGADDSAEEGDLLDDDDNEDRGDDQLELIKDDEKEAEEGEDDRDSANGG

SEQ ID NO: 138 - protein, 437 aa, Homo sapiens [sequence omitted]

SEQ ID NO: 139 - protein, 126 aa, Homo sapiens
MSIGVPIKVLHEAEGHIVTCETNTGEVYRGKLIEAEDNMNCQMSNITVTYRDGRVAQLEQVYIRGSKIRFLILPDMLKNAPMLKSMKNKNQGSGAGRGKAAILKAQVAARGRGRGMGRGNIFQKRR

SEQ ID NO: 140 - protein, 117 aa, Homo sapiens [sequence omitted]

SEQ ID NO: 141 - protein, 119 aa, Homo sapiens
MKLVRFLMKLSHETVIIELKNGTQVHGTITGVDVSMNTHLKAVKMTLKNREPVQLETLSIRGNNIRYFILPDSLPLDTLLVDVEPKVKSKKREAVAGRGRGRGRGRGRGRGRGRGGSRR

SEQ ID NO: 142 - protein, 119 aa, Homo sapiens
MKLVRFLMKLSHETVTIELKNGTQVHGTITGVDVSMNTHLKAVKMTLKNREPVQLETLSIRGNNIRYFILPDSLPLDTLLVDVEPKVKSKKREAVAGRGRGRGRGRGRGRGRGRGGPRR

SEQ ID NO: 143 - protein, 269 aa, Homo sapiens
MEVKPPPGCPQPDSGSRRRRWGEEGHDPKEPEQLRKLFIGGLSFETTDDSLREHFEKWGTLTDCLVMRDPQTKRSRGFGFVTYSCVTEVDAAIGARPFKVDGRVVEPKRAVSREDSVKPGAHLTVKKIFVGSIKEDTEEYNLRDYFEKYGKIETIEVMEDRQSGKKRGFASVTFDDHDTVDKIVVQKYHTINGHNCEVKKALAKQVMQPAGSQRGRGGGSGNCMGHRGNFGGGGGNFGRDGNFGGRGGYGGGGGGSRGSYGGGDVDIMD

SEQ ID NO: 144 - protein, 488 aa, Homo sapiens
MAYSQGGGKKKVCYYYDGDIGNYYYGQGHPMKPHRIRMTHNLLLNYGLYRKMEIYRPHKATAEEMTKYHSDEYIKFLRSIRPDNMSEYSKQMHIFNVGEDCPAFDGLFEFCQLSTGGSVAGAVKLNRQQTDMAVNWAGGLHHAKKYEASGFCYVNDIVLAILELLKYHQRVLYIDIDIHHGDGVEEAFYTTDRVMTVSFHKYGEYFPGTGDLRDIGAGKGKYYAVNFPMCDGIDDESYGQIFKPIISKVMEMYQPSAVVLQCGADSLSGDRLGCFNLTVKGHAKCVEVVKTFNLPLLMLGGGGYTIRNVARCWTYETAVALDCEIPNELPYNDYFEYFGPDFKLHISPSNMTNQNTPEYMEKIKQRLFENLRMLPHAPGVQMQAIPEDAVHEDSGDEDGEDPDKRISIRASDKRIACDEEFSDSEDEGEGGRRNVADHKKGAKKARIEEDKKETEDKKTDVKEEDKSKDNSGEKTDTKGTKSEQLSNP

SEQ ID NO: 145 - protein, 733 aa, Homo sapiens
MSGFDDPGIFYSDSFGGDAQADEGQARKSQLQRRFKEFLRQYRVGTDRTGFTFKYRDELKRHYNLGEYWIEVEMEDLASFDEDLADYLYKQPAEHLQLLEEAAKEVADEVTRPRPSGEEVLQDIQVMLKSDASPSSIRSLKSDMMSHLVKIPGIIIAASAVRAKATRISIQCRSCRNTLTNIAMRPGLEGYALPRKCNTDQAGRPKCPLDPYFIMPDKCKCVDFQTLKLQELPDAVPHGEMPRHMQLYCDRYLCDKVVPGNRVTIMGIYSIKKFGLTTSRGRDRVGVGIRSSYIRVLGIQVDTDGSGRSFAGAVSPQEEEEFRRLAALPNVYEVISKSIAPSIFGGTDMKKAIACLLFGGSRKRLPDGLTRRGDINLLMLGDPGTAKSQLLKFVEKCSPIGVYTSGKGSSAAGLTASVMRDPSSRNFIMEGGAMVLADGGVVCIDEFDKMREDDRVAIHEAMEQQTISIAKAGITTTLNSRCSVLAAANSVFGRWDETKGEDNIDFMPTILSRFDMIFIVKDEHNEVRDVMLAKHVITLHVSALTQTQAVEGEIDLAKLKKFIAYCRVKCGPRLSAEAAEKLKNRYIIMRTGPVSTRGTVTASSIPITVRQLEAIVRIAEALSKMKLQPFATEADVEEALRLFQVSTLDAALSGTLSGVEGFTSQEDQEMLSRIEKQLKRRFAIGSQVSEHSIIKDFTKQKYPEHAIHKVLQLMLRRGEIQHRMQRKVLYRLK

SEQ ID NO: 146 - protein, 218 aa, Homo sapiens
SETAPAAPAAPAPAEKTPVKKKARKSAGAAKRKASGPPVSELITKAVAASKERSGVSLAALKKALAAAGYDVEKNNSRIKLGLKSLVSKGTLVQTKGTGASGSFKLNKKAASGEAKPKAKKAGAAKAKKPAGAAKKPKKATGAATPKKSAKKTPKKAKKPAAAAGAKKAKSPKKAKAAKPKKAPKSPAKAKAVKPKAAKPKTAKPKAAKPKKAAAKKK

SEQ ID NO: 147 - protein, 369 aa, Homo sapiens
MSSRGGKKKSTKTSRSAKAGVIFPVGRMLRYIKKGHPKYRIGVGAPVYMAAVLEYLTAEILELAGNAARDNKKGRVTPRHILLAVANDEELNQLLKGVTIASGGVLPNIHPELLAKKRGSKGKLEAIITPPPAKKAKSPSQKKPVSKKAGGKKGARKSKKKQGEVSKAASADSTTEGTPADGFTVLSTKSLFLGQKLQVVQADIASIDSDAVVHPTNTDFYIGGEVGNTLEKKGGKEFVEAVLELRKKNGPLEVAGAAVSAGHGLPAKFVIHCNSPVWGADKCEELLEKTVKNCLALADDKKLKSIAFPSIGSGRNGFPKQTAAQLILKAISSYFVSTMSSSIKTVYFVLFDSESIGIYVQEMAKLDAN

SEQ ID NO: 148 - protein, 126 aa, Homo sapiens [sequence omitted]

SEQ ID NO: 149 - protein, 78 aa, Homo sapiens
MPEPAKSAPAPKKGSKKAVTKAQKKDGKKRKRSRKESYSIYVYKVLKQVHPDTGISSKAMGIMNSFVNDIFERIAGLP

SEQ ID NO: 150 - protein, 128 aa, Homo sapiens
MAGGKAGKDSGKAKTKAVSRSQRAGLQFPVGRIHRHLKSRTTSHGRVGATAAVYSAAILEYLTAEVLELAGNASKDLKVKRITPRHLQLAIRGDEELDSLIKATIAGGGVIPHIHKSLIGKKGQQKTV

SEQ ID NO: 151 - protein, 130 aa, Homo sapiens
MSGRGKQGGKARAKAKTRSSRAGLQFPVGRVHRLLRKGNYAERVGAGAPVYLAAVLEYLTAEILELAGNAARDNKKTRIIPRHLQLAIRNDEELNKLLGKVTIAQGGVLPNIQAVLLPKKTESHHKAKGK

SEQ ID NO: 152 - protein, 129 aa, Homo sapiens
  MOD_RES (37)..(38): variable amino acid
SGRGKQGGKARAKAKTRSSRAGLQFPVGRVHRLLRKXXYSERVGAGAPVYLAAVLEYLTAEILELAGNAARDNKKTRIIPRHLQLAIRNDEELNKLLGRVTIAQGGVLPNIQAVLLPKKTESHHKAKGK

SEQ ID NO: 153 - protein, 270 aa, Homo sapiens
MQRKINAGIWAPDERKVCPQKGNGAVRKKKEKGRTAASVFAQLWQLSVVGGLETLWQYLAALYQDSLRNPEQVSSSELTSTRVSLSYCSQVEKTVMSLTSGSTALILVDFYLELHLKQKGDNEGGLYTMARTRWTARKSTGGIAPRKQLATKATCKSAPSTGGVKKPHRYRPGTVALREIRHYQKSTELLIRKLPFQRLVREIAQDFKTDLRFQRAAIGTLQEASEAYLVGLFEDTNLCAIHATRVTIMPKDIQLARHIRGERVSEYTMM

SEQ ID NO: 154 - protein, 103 aa, Homo sapiens [sequence omitted]

SEQ ID NO: 155 - protein, 98 aa, Homo sapiens
MSVRGKAGKGLGKGGAKCHRKVLSDNIQGITKCTIRRLARHGGVKRILGLIYEETRRVFKVFLENVIWYAVTNTEHAKRKTVTAMAVVYVLKRQGRTL

SEQ ID NO: 156 - protein, 136 aa, Homo sapiens
MARTKQTARKSTGGKAPRKQLATKVARKSAPATGGVKKPHRYRPGTVALREIRRYQKSTELLIRKLPFQRLMREIAQDFKTDLRFQSSAVMALQEACESYLVGLFEDTNLCVIHAKRVTIMPKDIQLARRIRGERA

SEQ ID NO: 157 - protein, 194 aa, Homo sapiens
MTENSTSAPAAKPKRAKASKKSTDHPKYSDMIVAAIQAEKNRAGSSRQSIQKYIKSHYKVGENADSQIKLSIKRLVTTGVLKQTKGVGASGSFRLAKSDEPKKSVAFKKTKKEIKKVATPKKASKPKKAASKAPTKKPKATPVKKAKKKLAATPKKAKKPKTVKAKPVKASKPKKAKPVKPKAKSSAKRAGKKK

SEQ ID NO: 158 - protein, 135 aa, Homo sapiens
MARTKQTARKSTGGKAPRKQLATKAARKSAPATGGVKKPHRYRPGTVALREIRRYQKSTELLIRKLPFQRLVREIAQDFKTDLRFQSSAVMALQEACEAYLVGLFEDTNLCAIHAKRVTIMPKDIQLARRIRGEA

SEQ ID NO: 159 - protein, 102 aa, Homo sapiens [sequence omitted]

SEQ ID NO: 160 - protein, 183 aa, Homo sapiens [sequence omitted]

SEQ ID NO: 161 - protein, 277 aa, Homo sapiens
MSAPAAKVSKKELNSNHDGADETSEKEQQEAIEHIDEVQNEIDRLNEQASEEILKVEQKYNKLRQPFFQKRSELIAKIPNFWVTTFVNHPQVSALLGEEDEEALHYLTRVEVTEFEDIKSGYRIDFYFDENPYFENKVLSKEFHLNESGDPSSKSTEIKWKSGKDLTKRSSQTQNKASRKRQHEEPESFFTWFTDHSDAGADELGEVIKDDIWPNPLQYYLVPDMDDEEGEGEEDDDDDEEEEGLEDIDEEGDEDEGEEDEDDDEGEEGEEDEGEDD

SEQ ID NO: 162 - protein, 494 aa, Homo sapiens
MFEIKKICCIGAGYVGGPTCSVIAHMCPEIRVTVVDVNESRINAWNSPTLPIYEPGLKEVVESCRGKNLFFSTNIDDAIKEADLVFISVNTPTKTYGMGKGRAADLKYIEACARRIVQNSNGYKIVTEKSTVPVRAAESIRRIFDANTKPNLNLQVLSNPEFLAEGTAIKDLKNPDRVLIGGDETPEGQRAVQALCAVYEHWVPREKILTTNTWSSELSKLAANAFLAQRISSINSISALCEATGADVEEVATAIGMDQRIGNKFLKASVGFGGSCFQKDVLNLVYLCEALNLPEVARYWQQVIDMNDYQRRRFASRIIDSLFNTVTDKKIAILGFAFKKDTGDTRESSSIYISKYLMDEGAHLHIYDPKVPREQIVVDLSHPGVSEDDQVSRLVTISKDPYEACDGAHAVVICTEWDMFKELDYERIHKKMLKPAFIFDGRRVLDGLHNELQTIGFQIETIGKKVSSKRIPYAPSGEIPKFSLQDPPNKKPKV

SEQ ID NO: 163 - protein, 594 aa, Homo sapiens
MVLLHVLFEHAVGYALLALKEVEEISLLQPQVEESVLNLGKFHSIVRLVAFCPFASSQVALENANAVSEGVVHEDLRLLLETHLPSKKKKVLLGVGDPKIGAAIQEELGYNCQTGGVIAEILRGVRLHFHNLVKGLTDLSACKAQLGLGHSYSRAKVKFNVNRVDNMIIQSISLLDQLDKDINTFSMRVREWYGYHFPELVKIINDNATYCRLAQFIGNRRELNEDKLEKLEELTMDGAKAKAILDASRSSMGMDISAIDLINIESFSSRVVSLSEYRQSLHTYLRSKMSQVAPSLSALIGEAVGARLIAHAGSLTNLAKYPASTVQILGAEKALFRALKTRGNTPKYGLIFHSTFIGRAAAKNKGRISRYLANKCSIASRIDCFSEVPTSVFGEKLREQVEERLSFYETGEIPRKNLDVMKEAMVQAEEAAAEITRKLEKQEKKRLKKEKKRLAALALASSENSSSTPEECEEMSEKPKKKKKQKPQEVPQENGMEDPSISFSKPKKKKSFSKEELMSSDLEETAGSTSIPKRKKSTPKEETVNDPEEAGHRSGSKKKRKFSKEEPVSSGPEEAVGKSSSKKKKKFHKASQED

SEQ ID NO: 164 - protein, 529 aa, Homo sapiens; identical to SEQ ID NO: 78

SEQ ID NO: 165 - protein, 427 aa, Homo sapiens [sequence omitted]

SEQ ID NO: 166 - protein, 711 aa, Homo sapiens [sequence omitted]

SEQ ID NO: 167 - protein, 4128 aa, Homo sapiens [sequence omitted]

SEQ ID NO: 168 - protein, 707 aa, Homo sapiens
MSRDRFRSRGGGGGGFHRRGGGGGRGGLHDFRSPPPGMGLNQNRGPMGPGPGQSGPKPPIPPPPPHQQQQQPPPQQPPPQQPPPHQPPPHPQPHQQQQPPPPPQDSSKPVVAQGPGPAPGVGSAPPASSSAPPATPPTSGAPPGSGPGPTPTPPPAVTSAPPGAPPPTPPSSGVPTTPPQAGGPPPPPAAVPGPGPGPKQGPGPGGPKGGKMPGGPKPGGGPGLSTPGGHPKPPHRGGGEPRGGRQHHPPYHQQHHQGPPPGGPGGRSEEKISDSEGFKANLSLLRRPGEKTYTQRCRLFVGNLPADITEDEFKRLFAKYGEPGEVFINKGKGFGFIKLESRALAEIAKAELDDTPMRGRQLRVRFATHAAALSVRNLSPYVSNELLEEAFSQFGPIERAVVIVDDRGRSTGKGIVEFASKPAARKAFERCSEGVFLLTTTPRPVIVEPLEQLDDEDGLPEKLAQKNPMYQKERETPPRFAQHGTFEYEYSQRWKSLDEMEKQQREQVEKNMKDAKDKLESEMEDAYHEHQANLLRQDLMRRQEELRRMEELHNQEMQKRKEMQLRQEEERRRREEEMMIRQREMEEQMRRQREESYSRMGYMDPRERDMRMGGGGAMNMGDPYGSGGQKFPPLGGGGGIGYEANPGVPPATMSGSMMGSDMRTERFGQGGAGPVGGQGPRGMGPGTPAGYGRGREEYEGPNKKPRF

SEQ ID NO: 169 - protein, 1014 aa, Homo sapiens [sequence omitted]

SEQ ID NO: 170 - protein, 869 aa, Homo sapiens
RATPPSPISACHSTMGRKLDPTKEKRGPGRKARKQKGAETELVRFLPAVSDENSKRLSSRARKRAAKRRLGSVEAPKTNKSPEAKPSPGKLPKGISAGAVQTAGKKGPQSLFNAPRGKKRPAPGSDEEEEEEDSEEDGMVNHGDLWGSEDDADTVDDYGADSNSEDEEEGEALLPIERAARKQKAREAAAGIQWSEEETEDEEEEKEVTPESGPPKVEEADGGLQINVDEEPFVLPPAGEMEQDAQAPDLQRVHKRIQDIVGILRDFGAQREEGRSRSEYLNRLKKDLAIYYSYGDFLLGKLMDLFPLSELVEFLEANEVPRPVTLRTNTLKTRRRDLAQALINRGVNLDPLGKWSKTGLVVYDSSVPIGATPEYLAGHYMLQGASSMLPVMALAPQEHERILDMCCAPGGKTSYMAQLMKNTGVILANDANAERLKSVVGNLHRLGVTNTIISHYDGRQFPKVVGGFDRVLLDAPCSGTGVISKDPAVKTNKDEKDILRCAHLQKELLLSAIDSVNATSKTGGYLVYCTCSITVEENEWVVDYALKKRNVRLVPTGLDFGQEGFTRFRERRFHPSLRSTRRFYPHTHNMDGFFIAKFKKFSNSIPQSQTGNSETATPTNVDLPQVIPKSENSSQPAKKAKGAGKTKQQLQKQQHPKKASFQKLNGISKGADSELSTVPSVTKTQASSSFQDSSQPAGKAEGIREPKVTGKLKQRSPKLQSSKKVAFLRQNAPPKGTDTQTPAVLSPSKTQATLKPKDHHQPLGRAKGVEKQQFAEQPFEKAAFQKQNDTPKGLSLPLCLPSVPAAPHQQRGRNLSPGATASCCYLRWLKTRRVAHCHCHQVGTLASVRMPSLLCIPMKFNTHFKTSGH

SEQ ID NO: 171 - protein, 185 aa, Homo sapiens
MSSCGLETKGIKQDLIHRLQAYLEEHAEEEANEDVLGDETEEEKNPLSNRKNPLKKTVDVAAEKKVVKITSEIPQAERMQKRAEQFSVPVSLESKKAAQAARFGISSVPTKVCHLNTPMVNLDKPKERAQRFGLNVSSISRKSEDDKKLKKRKERFGIVTSSAGTGTTEDTEAKKRKRAERFGIA

SEQ ID NO: 172 - protein, 533 aa, Homo sapiens
MAFANLRKVLISDSLDPCCRKILQDGGLQVVEKQNLSKEELIAELQDCEGLIVRSATKVTADVINAAEKLQVVGRAGTGVDNVDLEAATRKGILVMNTPNGNSLSAAELTCGMIMCLARQIPQATASMKDGKWERKKFMGTELNGKTLGILGLGRIGREVATRMQSFGMKTIGYDPIISPEVSASFGVQQLPLEEIWPLCDFITVHTPLLPSTTGLLNDNTFAQCKKGVRVVNCARGGIVDEGALLRALQSGQCAGAALDVFTEEPPRDRALVDHENVISCPHLGASTKEAQSRCGEEIAVQFVDMVKGKSLTGVVNAQALTSAFSPHTKPWIGLAEALGTLMRAWAGSPKGTIQVITQGTSLKNAGNCLSPAVIVGLLKEASKQADVNLVNAKLLVKEAGLNVTTSHSPAAPGEQGFGECLLAVALAGAPYQAVGLVQGTTPVLQGLNGAVFRPEVPLRRDLPLLLFRTQTSDPAMLPTMIGLLAEAGVRLLSYQTSLVSDGETWHVMGISSLLPSLEAWKQHVTEAFQFHF

SEQ ID NO: 173 - protein, 1279 aa, Homo sapiens [sequence omitted]

SEQ ID NO: 174 - protein, 801 aa, Homo sapiens
LPLHAVEKTGRPGQPALKMPGKLRSDAGLESDTAMKKGETLRKQIEEKEKKEKPKSDKTEEIAEEEETVFPKAKQVKKKAEPSEVDMNSPKSKKAKKKEEPSQNDISPKTKSLRKKKEPIEKKVVSSKTKKVTKNEEPSEEEIDAPKPKKMKKEKEMNGETREKSPKLKNGFPHPEPDCNPSEAASEESNSEIEQEIPVEQKEGAFSNFPISEETIKLLKGRGVTFLFPIQAKTFHHVYSGKDLIAQARTGTGKTFSFAIPLIEKLHGELQDRKRGRAPQVLVLAPTRELANQVSKDFSDITKKLSVACFYGGTPYGGQFERMRNGIDILVGTPGRIKDHIQNGKLDLTKLKHVVLDEVDQMLDMGFADQVEEILSVAYKKDSEDNPQTLLFSATCPHWVFNVAKKYMKSTYEQVDLIGKKTQKTAITVEHLAIKCHWTQRAAVIGDVIRVYSGHQGRTIIFCETKKEAQELSQNSAIKQDAQSLHGDIPQKQREITLKGFRNGSFGVLVATNVAARGLDIPEVDLVIQSSPPKDVESYIHRSGRTGRAGRTGVCICFYQHKEEYQLVQVEQKAGIKFKRIGVPSATEIIKASSKDAIRLLDSVPPTAISHFKQSAEKLIEEKGAVEALAAALAHISGATSVDQRSLINSNVGFVTMILQCSIEMPNISYAWKELKEQLGEEIDSKVKGMVFLKGKLGVCFDVPTASVTEIQEKWHDSRRWQLSVATEQPELEGPREGYGGFRGQREGSRGFRGQRDGNRRFRGQREGSRGPRGQRSGGGNKSNRSQNKGQKRSFSKAFGQ

SEQ ID NO: 175 - protein, 524 aa, Homo sapiens
MADDIDIEAMLEAPYKKDENKLSSANGHEERSKKRKKSKSRSRSHERKRSKSKERKRSRDRERKKSKSRERKRSRSKERRRSRSRSRDRRFRGRYRSPYSGPKFNSAIRGKIGLPHSIKLSRRRSRSKSPFRKDKSPVREPIDNLTPEERDARTVFCMQLAARIRPRDLEEFFSTVGKVRDVRMISDRNSRRSKGIAYVEFVDVSSVPLAIGLTGQRVLGVPIIVQASQAEKNRAAAMANNLQKGSAGPMRLYVGSLHFNITEDMLRGIFEPFGRIESIQLMMDSETGRSKGYGFITFSDSECAKKALEQLNGFELAGRPMKVGHVTERTDASSASSFLDSDELERTGIDLGTTGRLQLMARLAEGTGLQIPPAAQQALQMSGSLAFGAVADLQTRLSQQTEASALAAAASVQPLATQCFQLSNMFNPQTEEEVGWDTEIKDDVIEECNKHGGVIHIYVDKNSAQGNVYVKCPSIAAAIAAVNALHGRWFAGKMITAAYVPLPTYHNLFPDSMTATQLLVPSRR

SEQ ID NO: 176 - protein, 734 aa, Homo sapiens
MSGFDDPGIFYSDSFGGDAQADEGQARKSQLQRRFKEFLRQYRVGTDRTGFTFKYRDELKRHYNLGEYWIEVEMEDLASFDEDLADYLYKQPAEHLQLLEEAAKEVADEVTRPRPSGEEVLQDIQVMLKSDASPSSIRSLKSDMMSHLVKIPGIIIAASAVRAKATRISIQCRSCRNTLSNIAMRPGLEGYALPRKCNTDQAGRPKCPLDPYFIMPDKCKCVDFQTLKLQELPDAVPHGEVPRHMQLYCDRYLCDKVVPGNRVTIMGIYSIKKFGLTTSRGRDRVGVGIRSSYIRVLGIQVDTDGSGRSFAGAVSPQEEEEFRRLAALPNVYEVISKSIAPSIFGGTDMKKAIACLLFGGSRKRLPDGLTRRGDINLLMLGDPGTAKSQLLKFVEKCSPIGVYTSGKGSSAAGLTASVMRDPSSRNFIMEGGAWVLADGGVVCIDEFDKMREDDRVAIHEAMEQQTISIAKAGITTTLNSRCSVLAAANSVFGRWDETKGEDNIDFMPTILSRFDMIFIVKDEHNEERDVMLAKHVITLHVSALTQTQAVEGEIDLAKLKKFIAYCRVKCGPRLSAEAAEKLKNRYIIMRTGARQHERDSDRRSSIPITVRHVEAIVRIAEALSKMKLQPFATEADVEEALRLFQVSTLDAALSGTLSGVEGFTSQEDQEMLSRIEKQLKRRFAIGSQVSEHSIIKDFTKQKYPEHAIHKVLQLMLPRGEIQHRMQRKVLYRLK

SEQ ID NO: 177 - protein, 1304 aa, Homo sapiens
MAKIAKTHEDIEAQIREIQGKKAALDEAQGVGLDSTGYYDQEIYGGSDSRFAGYVTSIAATELEDDDDDYSSSTSLLGQKKPGYHAPVALLNDIPQSTEQYDPFAEHRPPKIADREDEYKKHRRTMIISPERLDPFADGGKTPDPKMNVRTYMDVMREQHLTKEEREIRQQLAEKAKAGELKVVNGAAASQPPSKRKRRWDQTADQTPGATPKKLSSWDQAETPGHTPSLRWDETPGRAKGSETPGATPGSKIWDPTPSHTPAGAATPGRGDTPGHATPGHGGATSSARKNRWDETPKTERDTPGHGSGWAETPRTDRGGDSIGETPTPGASKRKSRWDETPASQMGGSTPVLTPGKTPIGTPAMNMATPTPGHIMSMTPEQLQAWRWEREIDERNRPLSDEELDAMFPEGYKVLPPPAGYVPIRTPARKLTATPTPLGGMTGFHMQTEDRTMKSVNDQPSGNLPFLKPDDIQYFDKLLVDVDESTLSPEEQKERKIMKLLLKIKNGTPPMRKAALRQITDKAREFGAGPLFNQILPLLMSPTLEDQERHLLVKVIDRILYKLDDLVRPYVHKILVVIEPLLIDEDYYARVEGLEIISNLAKAAGLATMISTMRPDIDNMDEYVRNTTARAFAVVASALGIPSLLPFLKAVCKSKKSWQARHTGIKIVQQIAILMGCAILPHLRSLVEIIEHGLVDEQQKVRTISALAIAALAEAATPYGIESFDSVLKPLWKGIRQHRGKGLAAFLKAIGYLIPLMDAEYANYYTREVMLILIREFQSPDEEMKKIVLKVVKQCCGTDGVEANYIKTEILPPFFKHFWQHRMALDRRNYRQLVDTTVELANKVGAAEIISRIVDDLKDEAEQYRKMVMETIEKIMGNLGAADIDHKLEEQLIDGILYAFQEQTTEDSVMLNGFGTVVNALGKRVKPYLPQICGTVLWRLNNKSAKVRQQAADLISRTAVVMKTCQEEKLMGHLGVVLYEYLGEEYPEVLGSILGALKAIVNVIGMHKMTPPIKDLLPRLTPILKNRHEKVQENCIDLVGRIADRGAEYVSAREWMRICFELLELLKAHKKAIRRATVNTFGYIAKAIGPHDVLATLLNNLKVQERQNRVCTTVAIAIVAETCSPFTVLPALMNEYRVPELNVQNGVLKSLSFLFEYIGEMGKDYIYAVTPLLEDALMDRDLVHRQTASAVVQHMSLGVYGFGCEDSLNHLLNYVWPNVFETSPHVIQAVMGALEGLRVAIGPCRMLQYCLQGLFHPARKVRDVYWKIYNSIYIGSQDALIAHYPRIYNDDKNTYIRYELDYIL

SEQ ID NO: 178 - protein, 1217 aa, Homo sapiens
MFLYNLTLQRATGISFAIHGNFSGTKQQEIVVSRGKILELLRPDPNTGKVHTLLTVEVFGVIRSLMAFRLTGGTKDYIVVGSDSGRIVILEYQPSKNMFEKIHQETFGKSGCRRIVPGQFLAVDPKGRAVMISAIEKQKLVYILNRDAAARLTISSPLEAHKANTLVYHVVGVDVGFENPMFACLEMDYEEAGNDPTGEAAANTQQTLTFYELDLGLNHVVRKYSEPLEEHGNFLITVPGGSDGPSGVLICSENYITYKNFGDQPDIRCPIPRRRNDLDDPERGMIFVCSATHKTKSMFFFWAQTEQGDIFKITLETDEDMVTEIRLKYFDTVPVAAAMCVLKTGFLFVASEFGNHYLYQIAHLGDDDEEPEFSSAMPLEEGDTFFFQPRPLKNLVLVDELDSLSPILFCQIADLANEDTPQLYVACGRGPRSSLRVLRHGLEVSEMAVSELPGNPNAVWTVRRHIEDEFDAYIIVSFVNATLVLSIGETVEEVTDSGFLGTTPTLSCSLLGDDALVQVYPDGIRHIRADKRVNEWKTPGKKTIVKCAVNQRQVVIALTGGELVYFEMDPSGQLNEYTERKEMSADVVCMSLANVPPGEQRSRFLAVGLVDNTVRIISLDPSDCLQPLSMQALPAQPESLCIVEMGGTEKQDELGERGSIGFLYLNIGLQNGVLLRTVLDPVTGDLSDTRTRYLGSRPVKLFRVRMQGQEAVLAMSSRSWLSYSYQSRFHLTPLSYETLEFASGFASEQCPEGIVAISTNTLRILALEKLGAVFNQVAFPLQYTPRKFVIHPESNNLIIIETDHNAYTEATKAQRKQQMAEEMVEAAGEDERELAAEMAAAFLNENLPESIFGAPKAGNGQWASVIRVMNPIQGNTLDLVQLEQNEAAFSVAVCRFSNTGEDWYVLVGVAKDLILNPRSVAGGFVYTYKLVNNGEKLEFLHKTPVEEVPAAIAPFQGRVLIGVGKLLRVYDLGKKKLLRKCENKHIANYISGIQTIGHRVIVSDVQESFIWVRYKRNENQLIIFADDTYPRWVTTASLLDYDTVAGADKFGNICVVRLPPNTNDEVDEDPTGNKALWDRGLLNGASQKAEVIMNYHVGETVLSLQKTTLIPGGSESLVYTTLSGGIGILVPFTSHEDHDFFQHVEMHLRSEHPPLCGRDHLSFRSYYFPVKNVIDGDLCEQFNSMEPNKQKNVSEELDRTPPEVSKKLEDIRTRYAF

SEQ ID NO: 179 - protein, 709 aa, Homo sapiens; identical to SEQ ID NO: 39

SEQ ID NO: 180 - protein, 218 aa, Homo sapiens
DGRIFIGTFKAFDKHMNLILCDCDEFRKIKPKNAKQPEREEKRVLGLVLLRGENLVSMTVEGPPPKDTGIARVPLAGAAGGPGVGRAAGRGVPAGVPIPQAPAGLAGPVRGVGGPSQQVMTPQGRGTVAAAAVAATASIAGAPTQYPPGRGTPPPPVGRATPPPGIMAPPPGMRPPMGPPIGLPPARGTPIGMPPPGMRPPPPGIRGPPPPGMRPPRP

SEQ ID NO: 181 - protein, 623 aa, Homo sapiens [sequence omitted]

SEQ ID NO: 182 - protein, 671 aa, Homo sapiens
MRPMRIFVNDDRHVMAKHSSVYPTQEELEAVQNMVSHTERALKAVSDWIHEQEKGSSEQAESDNMDVPPEDDSKEGAGEQKTEHMTRTCRGVMRAGPGGQSASYSRGTWIWSWCCCVRRSPQPALLDKVADNLAIQLAAVTEDKYEILQSVDDAAIVIKNTKEPPLSLTIHLTSPVVREEMEKVLAGETLSVNDPPDVLDRQKCFAALASLRHAKWFQARANGLKSCVIVIRVLRDLCTRVPTWGPLRGWPLELLCEKSIGTANRPMGAGEALRRVLECLASGIVMPDGSGIYDPCEKEATDAIGHLDRQQREDITQSAQHALRLAAFGQLHKVLGMDPLPSKMPKKPKNENPVDYTVQIPPSTTYAITPMKRPMEEDGEEKSPSKKKKKIQKKEEKAEPPQAMNALMRLNQLKPGLQYKLVSQTGPVHAPIFTMSVEVDGNSFEASGPSKKTAKLHVAVKVLQDMGLPTGAEGRDSSKGEDSAEETEAKPAVVAPAPVVEAVSTPSAAFPSDATAENVKQQGPILTKHGKNPVMELNEKRRGLKYELISETGGSHDKRFVMEVEVDGQKFQGAGSNKKVAKAYAALAALEKLFPDTPLSPLMPTKRREPQYPSEGDRNLLLSHITLASAWEAPCTTKCPHPPTFEGGEEAGRSGDEGAGEDLVAPTMEAT

SEQ ID NO: 183 - protein, 257 aa, Homo sapiens
MADKMDMSLDDIIKLNRSQRGGRGGGRGRGRAGSQGGRGGGAQAAARVNRGGGPIRNRPAIARGAAGGGGRNRPAPYSRPKQLPDKWQHDLFDSGFGGGAGVETGGKLLVSNLDFGVSDADIQELFAEFGTLKKAAVHYDRSGRSLGTADVHFERKADALKAMKQYNGVPLDGRPMNIQLVTSQIDAQRRPAQSVNRGGMTRNRGAGGFGGGGGTRRGTRGGARGRGRGAGRNSKQQLSAEELDAQLDAYNARMDTS

SEQ ID NO: 184 - protein, 464 aa, Homo sapiens [sequence omitted]

SEQ ID NO: 185 - protein, 570 aa, Homo sapiens [sequence omitted]

SEQ ID NO: 186 - protein, 15 aa, Homo sapiens
GQEGEYAVPFDAVAR

SEQ ID NO: 187 - protein, 412 aa, Homo sapiens
MGDGAVKQGFLYLQQQQTFGKKWRRFGASLYGGSDCALARLELQEGPEKPRRCEAARKVIRLSDCLRVAEAGGEASSPRDTSAFFLETKERLYLLAAPAAERGDWVQAICLLAFPGQRKELSGPEGKQSRPCMEENELYSSAVTVGPHKEFAVTMRPTEASERCHLRGSYTLRAGESALELWGGPEPGTQLYDWPYRFLRRFGRDKVTFSFEAGRRCVSGEGNFEFETRQGNEIFLALEEAISAQKNAAPATPQPQPATIPASLPRPDSPYSRPHDSLPPPSPTTPVPAPRPRGQEGEYAVPFDAVARSLGKNFRGILAVPPQLLADPLYDSIEETLPPRPDHIYDEPEGVAALSLYDSPQEPRGEAWRRQATADRDPAGLQHVQPAGQDFSASGWQPGTEYDNVVLKKGPK

SEQ ID NO: 188 - protein, 10 aa, Homo sapiens
ILLAELEQLK

SEQ ID NO: 189 - protein, 10 aa, Homo sapiens
LGDLYEEEMR

SEQ ID NO: 190 - protein, 11 aa, Homo sapiens
EEAENTLQSFR

SEQ ID NO: 191 - protein, 19 aa, Homo sapiens
LLQDSVDFSLADAINTEFK

SEQ ID NO: 192 - protein, 13 aa, Homo sapiens
KVESLQEEIAFLK

SEQ ID NO: 193 - protein, 14 aa, Homo sapiens
LQDEIQNMKEEMAR

SEQ ID NO: 194 - protein, 19 aa, Homo sapiens
LQEEMLQREEAENTLQSFR

SEQ ID NO: 195 - protein, 14 aa, Homo sapiens
ILLAELEQLKGQGK

SEQ ID NO: 196 - protein, 19 aa, Homo sapiens
VLQLINDNTATALSYGVFR

SEQ ID NO: 197 - protein, 15 aa, Homo sapiens
ETNLDSLPLVDTHSK

SEQ ID NO: 198 - protein, 14 aa, Homo sapiens
TYSLGSALRPSTSR

SEQ ID NO: 199 - protein, 14 aa, Homo sapiens
ISLPLPNFSSLNLR

SEQ ID NO: 200 - protein, 14 aa, Homo sapiens
  MOD_RES (7): phospho-Tyr
LMTGDTYTAHAGAK

SEQ ID NO: 201 - protein, 13 aa, Homo sapiens
  MOD_RES (8): phospho-Tyr
NSLETLLYKPVDR

SEQ ID NO: 202 - protein, 9 aa, Homo sapiens
DENYMIAMR

SEQ ID NO: 203 - protein, 11 aa, Homo sapiens
LYLLAAPAAER

SEQ ID NO: 204 - protein, 11 aa, Homo sapiens
DLACLIAGYYR

SEQ ID NO: 205 - protein, 11 aa, Homo sapiens
MSGDPDLEYYK

SEQ ID NO: 206 - protein, 20 aa, Homo sapiens
ESTTTPGQYVLTGLQSGQPK

SEQ ID NO: 207 - protein, 14 aa, Homo sapiens
  MOD_RES (7): phospho-Tyr
TLSEVDYAPAGPAR

SEQ ID NO: 208 - protein, 18 aa, Homo sapiens
AIQDYLSTQLAQDSEFVK

1-131. (canceled)

132. A method of detecting one or more biomolecules, comprising detecting in a biological sample, expression of a protein of Table 1, or a nucleic acid encoding a protein of Table 1, wherein said biological sample is a sample of a patient with a breast pathology.

133. The method of claim 132, wherein said biological sample is a tumor biopsy sample.

134. The method of claim 132, wherein said biological sample is a breast tumor biopsy sample.

135. The method of claim 132, wherein the biological sample is a serum sample.

136. The method of claim 132, wherein said biological sample comprises blood, plasma, serum, urine, saliva, lymphatic fluid, pelvic lavage, lung aspirate, nipple aspirate, or breast duct lavage.

137. The method of claim 132, wherein expression is detected for two or more proteins of Table 1, or nucleic acids encoding two or more proteins of Table 1.

138. The method of claim 132, wherein expression is detected for three or more proteins of Table 1, or nucleic acids encoding three or more proteins of Table 1.

139. The method of claim 132, wherein expression is detected for four or more proteins of Table 1, or nucleic acids encoding four or more proteins of Table 1.

140. The method of claim 132, wherein expression is detected for one or more proteins of Table 2, or nucleic acids encoding one or more proteins of Table 2.

141. The method of claim 132, wherein the protein is annexin V chain c (SEQ ID NO:7), epididymal protein (SEQ ID NO:17), glutaminase (SEQ ID NO:19), inter-alpha-trypsin inhibitor heavy chain 3 precursor (SEQ ID NO:25), alpha 2 macroglobulin (SEQ ID NO:29), membrane alanine aminopeptidase precursor (SEQ ID NO:30), type-2 phosphatidic acid phosphohydrolase (SEQ ID NO:33), pregnancy zone protein precursor (SEQ ID NO:36), transglutaminase 2 isoform a/transglutaminase C (SEQ ID NO:42), the unnamed protein product having a sequence with NCBI database Genbank gi 7023123 (SEQ ID NO:47), autoantigen p542 (SEQ ID NO:55), the 34 kD nucleolar sclerodema antigen (SEQ ID NO:71), lysosomal proteinase cathepsin b (SEQ ID NO:74), osteoblast-specific factor 2 (SEQ ID NO:79), SP—H antigen (SEQ ID NO:84), thyroid-lupus autoantigen p70 (SEQ ID NO:91), the unnamed protein product having NCBI database Genbank gi 32097 (SEQ ID NO:96), the unnamed protein product having NCBI database Genbank gi 7022744 (SEQ ID NO:97), the unnamed protein product having NCBI database Genbank gi 21749696 (SEQ ID NO:98), a hypothetical protein (mago-nashi homolog) having NCBI database Genbank gi 15012020 (SEQ ID NO:107), a hypothetical protein (LS1-like) having NCBI database Genbank gi 15778927 (SEQ ID NO:108), a protein (human mRNA, complete cds gene product) having NCBI database Genbank gi 348239 (SEQ ID NO:109), FTSJ3 protein (SEQ ID NO:110), a predicted protein (similar to RIKEN cDNA 0610009D07) having NCBI having database Genbank gi 50745107(SEQ ID NO:111), chromosome segregation protein smc1 (SEQ ID NO:119), CPSF6 protein (SEQ ID NO:123), DNA-activated protein kinase (SEQ ID NO:167) and DNA-activated protein kinase catalytic subunit (SEQ ID NO:126), activating signal cointegrator 1 complex subunit 3-like 1 (SEQ ID NO:130), heterogeneous nuclear ribonucleoprotein M, (SEQ ID NO:133) a protein similar to small nuclear ribonucleoprotein D1 having NCBI database Genbank gi 34877889 (SEQ ID NO:142), histone deacetylase 2 (SEQ ID NO:144), histone H1b (SEQ ID NO:146), histone H2A.5 (SEQ ID NO:152), a protein similar to histone H3 having NCBI database Genbank gi 30156584 (SEQ ID NO:153), histone H3 (SEQ ID NO:158), histone H4 (SEQ ID NO:159), nucleolar protein NOP5/NOP58 (SEQ ID NO:107; SEQ ID NO:164), PTB-associated splicing factor (SEQ ID NO:168), or SmB/B′ autoimmune antigen (SEQ ID NO:180).

142. The method of claim 132, wherein the protein is annexin V chain c (SEQ ID NO:7), epididymal protein (SEQ ID NO:17), glutaminase (SEQ ID NO:19), inter-alpha-trypsin inhibitor heavy chain 3 precursor (SEQ ID NO:30), alpha 2 macroglobulin (SEQ ID NO:29), membrane alanine aminopeptidase precursor (SEQ ID NO:31), type-2 phosphatidic acid phosphohydrolase (SEQ ID NO:33;), pregnancy zone protein precursor (SEQ ID NO:36), transglutaminase 2 isoform a/transglutaminase C (SEQ ID NO:42), or the unnamed protein product having a sequence with NCBI database Genbank gi 7023123 (SEQ ID NO:47)

143. The method of claim 132, wherein the protein is autoantigen p542 (SEQ ID NO:55), the 34 kD nucleolar sclerodema antigen (SEQ ID NO:71), lysosomal proteinase cathepsin b (SEQ ID NO:74), osteoblast-specific factor 2 (SEQ ID NO: 79), SP—H antigen (SEQ ID NO:84), thyroid-lupus autoantigen p70 (SEQ ID NO:9), the unnamed protein product having NCBI database Genbank gi 32097 (SEQ ID NO:96), the unnamed protein product having NCBI database Genbank gi 7022744 (SEQ ID NO:97), the unnamed protein product having NCBI database Genbank gi 21749696 (SEQ ID NO:98), a hypothetical protein (mago-nashi homolog) having NCBI database Genbank gi 15012020 (SEQ ID NO:107), a hypothetical protein (LS1-like) having NCBI database Genbank gi 15778927 (SEQ ID NO:108), a protein (human mRNA, complete cds gene product) having NCBI database Genbank gi 348239 (SEQ ID NO:109), FTSJ3 protein (SEQ ID NO:110), a predicted protein (similar to RIKEN cDNA 0610009D07) having NCBI having database Genbank gi 50745107 (SEQ ID NO:111), chromosome segregation protein smc1 (SEQ ID NO:119; Genbank gi 2135244), CPSF6 protein (SEQ ID NO:123), DNA-activated protein kinase (SEQ ID NO:167) and DNA-activated protein kinase catalytic subunit (SEQ ID NO:126), activating signal cointegrator 1 complex subunit 3-like 1 (SEQ ID NO:130), heterogeneous nuclear ribonucleoprotein M (SEQ ID NO:133), a protein similar to small nuclear ribonucleoprotein D1 having NCBI database Genbank gi 34877889 (SEQ ID NO:142), histone deacetylase 2 (SEQ ID NO:144), histone H1b ((SEQ ID NO:146), histone H2A.5 (SEQ ID NO:152), a protein similar to histone H3 having NCBI database Genbank gi 30156584 (SEQ ID NO:153), histone H3 (SEQ ID NO:158), histone H4 (SEQ ID NO:159), nucleolar protein NOP5/NOP58 (SEQ ID NO:162), PTB-associated splicing factor (SEQ ID NO:168), or SmB/B′ autoimmune antigen (SEQ ID NO:180).

144. The method of claim 132, wherein an expression level of a protein of Table 1, or a nucleic acid encoding a protein of Table 1 is determined.

145. The method of claim 144, wherein an altered expression level in the biological sample compared to a normal sample is indicative of the presence of a breast pathology.

146. The method of claim 144, wherein an altered expression level in the biological sample compared to a normal sample is indicative of the presence of breast cancer.

147. The method of claim 144, further comprising correlating the expression level of the protein or the nucleic acid with a type of cancer.

148. The method of claim 144, further comprising correlating the expression level of said protein or nucleic acid with a stage of cancer.

149. The method of claim 144, further comprising correlating the expression level of said protein or nucleic acid with a prognosis.

150. The method of claim 144, further comprising correlating the expression level of said protein or nucleic acid with response to one or more anti-cancer agents.

151. The method of claim 132, wherein the detecting comprising contacting the biological sample with a specific binding reagent that binds to the protein or the nucleic acid.

152. The method of claim 151, wherein the specific binding reagent is an antibody or a nucleic acid.

153. The method of claim 132, wherein the detecting comprises an immunoassay.

154. A kit comprising a specific binding reagent that binds to a protein of Table 1, or that binds to a nucleic acid encoding a protein of Table 1, and a control, wherein the control is a biological sample derived from a subject having a breast pathology.

155. The kit of claim 154, wherein the specific binding reagent is an antibody or a nucleic acid.

156. The kit of claim 154, further comprising a specific binding reagent that binds to a second protein of Table 1, or that binds to a nucleic acid encoding a second protein of Table 1.

157. The kit of claim 154, further comprising a specific binding reagent that binds to a protein of Table 2, or that binds to a nucleic acid encoding a protein of Table 2.

158. The kit of claim 154, wherein the specific binding reagent binds to annexin V, chain c, epididymal protein, glutaminase, inter-alpha-trypsin inhibiot heavy chain 3 precursor, alpha 2 macroglobulin, membrane alanine aminopeptidase, type-2 phosphatidic acid phosphohydrolase, pregnancy zone protein precursor (Genbank gi 131756), transglutaminase 2 isoform a/transglutaminase C, the unnamed protein product having a sequence with NCBI database Genbank gi 7023123, autoantigen p542, the 34 kD nucleolar sclerodema antigen, lysosomal proteinase cathepsin b, osteoblast-specific factor 2, SP—H antigen, thyroid-lupus autoantigen p70, the unnamed protein product having NCBI database Genbank gi 32097, the unnamed protein product having NCBI database Genbank gi 7022744, the unnamed protein product having NCBI database Genbank gi 21749696, a hypothetical protein having NCBI database Genbank gi 7512749, a hypothetical protein having NCBI database Genbank gi15012020, a hypothetical protein having NCBI database Genbank gi 15778927, a protein having NCBI database Genbank gi 348239, FTSJ3 protein, a protein having NCBI database Genbank gi 50745107, chromosome segregation protein smc1, CPSF6 protein, DNA-activated protein kinase, U5 snRNP Sm D1(Sm-D autoantigen), histone deacetylase 2, histone H1b, histon H2A.5, histone H3, a protein similar to histone H3 having NCBI database Genbank gi 30156584, histone H4, nucleolar protein NOP5/NOP58, PTB-associated splicing factor, or SmB/B′ autoimmune antigen.

159. The kit of claim 154, wherein the specific binding reagent binds to a nucleic acid encoding annexin V, chain c, epididymal protein, glutaminase, inter-alpha-trypsin inhibiot heavy chain 3 precursor, alpha 2 macroglobulin, membrane alanine aminopeptidase, type-2 phosphatidic acid phosphohydrolase, pregnancy zone protein precursor (Genbank gi 131756), transglutaminase 2 isoform a/transglutaminase C, the unnamed protein product having a sequence with NCBI database Genbank gi 7023123, autoantigen p542, the 34 kD nucleolar sclerodema antigen, lysosomal proteinase cathepsin b, osteoblast-specific factor 2, SP—H antigen, thyroid-lupus autoantigen p70, the unnamed protein product having NCBI database Genbank gi 32097, the unnamed protein product having NCBI database Genbank gi 7022744, the unnamed protein product having NCBI database Genbank gi 21749696, a hypothetical protein having NCBI database Genbank gi 7512749, a hypothetical protein having NCBI database Genbank gi15012020, a hypothetical protein having NCBI database Genbank gi 15778927, a protein having NCBI database Genbank gi 348239, FTSJ3 protein, a protein having NCBI database Genbank gi 50745107, chromosome segregation protein smc1, CPSF6 protein, DNA-activated protein kinase, U5 snRNP Sm D1(Sm-D autoantigen), histone deacetylase 2, histone H1b, histon H2A.5, histone H3, a protein similar to histone H3 having NCBI database Genbank gi 30156584, histone H4, nucleolar protein NOP5/NOP58, PTB-associated splicing factor, or SmB/B′ autoimmune antigen.
